United States Patent Application Publication US 2026/0191916 A1 - sequence listing, part 68

SEQ ID NO: 457 - DNA, 3435958 bp, Odoribacter FBI02593 (residues 1,717,980-3,435,958 of 3,435,958)
  source 1..3435958: mol_type = genomic DNA
tatcgggaatatgaacaaccacctgtcccgattggcaggtggttgcccgatataacttccgcagccggtatcaggcggccatgcgctttcggataagggcgatgttcttatgcacgaggttcataatccgcttgtgatatttcgtatttttattacacagtcctctcgactgcagcaccttgaatgtttcgaggctcaattctacggtctcgaccctcttgtcctctatccgtgcggagaataccagcgtatccggtttgaggtaatattcgcactgtcccacgcagtggtgcaacgcattaccctcgtcgtagtaggcttccacgctatccagtacacggacgactatcgttccgtccgtgaactccagaccgaagaacttgcctttcaactccctaaaacgtgcctcgttttccctcgcccgtttcatctgctccttgcgtttttcctgctcttggagaatacgcaccttgttctgatacttgtcatgctcggctttcaaatcggcggggcaaacatagtgggcgttgtgcaagtccttgccgcatctgtcgagcatacggagataatccacccatattccaatgtccgttatccgatacttctggcgtaacacgattttgtaggacggccaacagaaatccaaatcctgcgggtggtcgatgaagtgcttgaggtctcgtttgcgtccacttttaagtattgtctccactcggctgtccgatagcagggctttcatcagcttttgcggggcgatgtcggcaaacgaccctttcagcccgttgcgccgtaacttcgggataaccgtgtagcccggacagacataacagtcggctatgcgttggtacacgtaattgtcgttccgcagttccaatcccgacccgtacagaaagctgtccaaataacaccccattgtccgttgcaaggctgtcaaagcggttttcccgttctcgtccaaccagtatctcgccacttcgcacacgtctgtccatgcgttcttgcctttgcggtaacagacattcattctgaaaatccgctgcacctgaaatccgtcctgcgtggtgatgacagaaaaatagcttttctcatctgtcttgcggcaaagcgtgtctttgagcgtcagtttggcgtggcagttcgggcaatggcaacgcttcgcctttgtctcgttccacctatgaccgcaatcgaggcaggtcgtttgtccgctcggtgtacgaaaagcgtaatgtccgacggtatgccggaacgcccattctgcctgtttctccgtgataggcagcaaccgcccgttggcggctactacctgatgctgaaattttgtccgtgctttcatggtcagaaatcgaagagtgagagttccgtttgggtattctgtacagctttggcggtcggcttcggcctgctgtggcgttgctgtatcttgcgcatttcttcctcctgataggctttcagcgcgtcttttcgggcttgcgccttttcttcttcggtcagctccaccttgtgattgaccacgacgccacaactgataggtttgcccacgtcgatgttgtcctcatcatagtaatgaatggcgagcgaccacacctcgtcgtcggtcattccgcaacagccgcttgccttgacttgattgagaatgaatgtgatacaatcgtccaagtttttgttttctttggcataggagacggcgaaaagttcgtccgtccgtgccttgccgtccaagtattccttgatagtccgtttgaaatgttccgtacctttcatcgttcagcgttttgaggttaaaaatgatagtcgatgacaccgccgatgtaaagcagcgtaccgggtttaaattcacatgcctgccgcaggaactcgtaggattgctcggcgttggattgcagcccctcctcgtccatgtagaaccagtaagcggtatcgagcgggtttttcaggaacttttcgagttgatagaccgggccaatccagtcctgcacgctttcgggggtaagggcttccgccctgcttcgaatgtctgcgatgaaatcttctctccatcgttccgcaccgcctttgtagcgtatggtatcgtcggaaacaagctcgaacatgcctttgggcagaatgttgtttaccaagttgtcgatatggaactggcgttcctcatcgtcaatctccgcacaatagtcaaagaaactatcgtcgccctgcgtgagggtgtcctcgttcaggtagttgtccttgctcacccgtgtttcggtaatttgaaaaatcttgctgtgcataactttaaatttttaatttgttgaacttgcttttttcttctccctgctttcggagcctttcggcttccttggcgggagagattttacatgcaagccagacagcggggaaaggacggaaaggcaagcaaacggccggagaatttcacggaatacccaacccgtcgaggtacgaggcgggggctgaaaggccatcttcgatttgcggaaggctgccgggcaaatccgcgagccgttagcatagtggtgcttgacgccggacgaccgctgtacctttgcatgagaaaatccaaccggcgaggaggcaacgggggcgagatcagggaaagaatgggataaccggaataaaagaggaagaagcccgattgtatatagaagtgggaataacggctaaaaaagaaaatctgcctgtgagggcgattgacaaaaaaagccccctgaaccttttgaccgtccaagggacttcacgtgcccggcaaagcggaattttcggaacgcgagccggattataaggtggcttttaatcgtaatgcataattcaacagatattttcctgaatcggaaaactcttttttatttcctgtatagacatacccgtggctctcataaaattttcttgctgcaaaattttcttccaacacccacaggtaaacctcttttacatcgtgactttttgctgttgtaaggaaatggcgcataagttttgtcccaacaccttctccttgaaagaacggatctacatacaactctttcaattcccatatactgtttttacaatccagtttcatcatcccctttacaatcccgtcatcaaaaacatatatatcgtccaaagctcctataacatcctgataatataatgcaagacgcaataccgacatttcattaaaggaaacatcatcgttttgaaaaatagggcgaaaggcttttcttttagagaaaatctgtatttccgcaagtcttgaagcatcctttatcgtggcaactctaatcatttttttgtttttataattttgtatttacatattattttcccaaaagtttctgttcttcacatactatccggcactgtttccagtatgtttttttcagaagcaaatatataaaaatcaattccacaaggtgccatgaacgactttttttattaagattcacaggaatgtgatataaaagagtttaactcctccgacgttcctttgcagctgcatagggtgtcgtgtgtcttgccttgatttgtcgggtaacgtcaggagcaaaaacgggaaacgctatcgggaggtagaaaggaatggaaatggggtataagggttataacaggtggacgtccgcttaaaaaggaatttcttgtgacatgccgggtatggcatataactggagagacgaccttgcggaataaagcccccgaaaccggctttgcaggttcggaggcttgtgccgcatgaggctatttatcagcgtttgccgtgcgcctgtcccagaagatagtcttgcagggattggtagcggttttgaatattagcgttttcattgaaaccgttcaggcaatgaagcaatgctttttcgagcgtgatgtatcggcggctgaaagtctgtacgttatccaagcaacaggcttccaaagcgtatttgaacggtgcaaaattttcaggttctttccgaatccgcacatgccacaggaagaacaactgaatcgtgaaactgtcggattcacctgctttcatcaaatgttcttcatcgagcaaccgtcggacaagctccggggtaagctggcaatcatttttccggtaatacatgcgttttgccgtattataggctgcaaactgttcgatgtcctgtgccgtctgcctgtatacttccgagtaaaatgcacgtacttctttacctgtaacaacgattttctcgtctccgaactcgtattcatacgctttttcatcggagatttcctcttctgttaaggtcttgaacccgtaacattccgttacgatgaacggttcttttccgaactccgccagagattcgagggcatggaggctgttgcaggagaagaacatgtcgtttccaatactttcaccgctttccagcagccggatttttacgtcttcggaatcgttggtgtacttccatactatccgacaacttgcataatggggcttcctgccgttcgcctcgacaaatccggcaaatccgctcttgatggcggcctttgtcttctctacatccgtcaggacgcttcgtgccttacaggtttcgcaccggccgaattgcaaagaatcgtcggaaatttccgttatcactttggtgttggggtttactgtggcttcgcatactacctgcgtaccgccacatcgtgtacatattatactcatatcttgtcaagattaaaaattaatatatctttctatccgctatattgaacttgtcgataaggttcagccaatggctgcaattccttttcaacaaaacaatttatccagattctgcttaaagcgtagcattaggcgacacttcccatcgcatttacgaaccgaccccatataggcgcattgaccgcttgtttcatcaaacaaaaaacatgactgccggaatgcctcaaaaattcttatcttaacctgttcgtccagaactttcccttccataatttgattaccatttgcgtgcataatacataaaagttaaattaaactccgagttatttatttccctcctctcggaagcttttcagctttccttgccgggagagattttacatgcagatcagacagcggggaaaggacgggaaggcaagcaaacagccggggatttcacggaatacccaacccgacaggcgcagcaaggagggaactgaaaggacatcttcgatttgggaaggctgccgggcaaatccacgagcggttagcatggcggtacttgacaccggacgaccgctgtacctttgcatgggaaaatccaaccggcgagaaagtggcggaaacgagataagggaaagaaggagatacgatagtggagtaaaaggggaagaagccggactgtataaaaaagccggaacattggctaaaaaaggaggtcgttccgtggaaacggcgtacagagaaagtcctctcgaacttttactgtccgagagggcttatcgtctactctataaaatggtaatgggcattttggcattctccgttcgattgtgtcttttgcaaaacgtcatcgacgctggaatatcggctaaaacagccgttatatatctgcttgccgtcgagcgttatccgttgcaggtaacagccgcatactccgtcacggctacggtcagcgacaaaatagaacacgataccgttgctgtacgacaatcgcaattccgtatagtttatctcggttttgggctgttcggtcggcagacgggtattgaaataacccgtagccagcatgacctgtccggcgaaacgcatggcttctgcccgatattttttcatggccgaagccacggggctttcgtcccgaccgtttccgacaaacgatgcgggcaggcttctgttcctgtaagacagtttgaacatgccgacctcttcctgcaccacgggcaggccgacagcttcgtactcctctttcgtcatttcgatgaaacgtgtgcgttcctcgtccagatagaggcggtaagcgggtttcacccgctcccgcttctcttcatattccgcctgttcccgtgcgttcatgcagttataaacgtgtcgggacactctccgcaccgcattgacgaaagtcgggcttttgcatatcccgaaatgccgggcgaagtcgggtacagtcccgataaagccgtactctttccaatgataggttctcatggctgtctgtccgatttaatccacgaccacatattcattgatactgcagcaagaatcggggttttcctgcgcccattcttcaaacagagccttggcatcctgttccgagcggacggtttttcctgcgacctcgccaagccacgcaaacaggctctccctgtcggcaaaatattcgcagaagtatttgcctttggcagtacataaatcgactatgtatttgtcggtaaaatacttgccttcgctgtcgttggtctcgtagaagcccattcccggctcttcggtctggtaataataacggagcgatgggaatttctcgcacacgaggtcgaatgtctcgttgcatggcccccatgccgtctccgtcgtaaagcggagggtttcgcctaccatttcgaggtttgcccaatctccccgacaactcaccttgtcccagtccttgcccaaggcatccacaagacaccccagccatgatgtcccgaagccgtttttcacggcaggcgtttttctgtcctgcaaatctttcatcaactcatagaggcttttgatttcctgcgcgtcgccctctatcacatacgctgttgaacaccagtttggcataatcgttaatttttattcgttaaactttttcttcccttttttcggaagctgttccggcttccttatcgggatagattttacatgcaggccagacagcgggaaaatgaggaaaaggcaaggaaaccgccggggattgaacggaatacccaacccgacagcgcagcacggcggggaccgaaaggtcatcttcgatttgggaaggctgccgggcaaatccgcgagccggttagcggagcggtacttgacgaccgaatgacgctgtaccttcgcatgggaaaatcacaccgacaagggagtgcggcagggagcgataagaacgagaataaataaaaaggagaggtgaacgggatataacgggtatagaatatggacttgaaaaggaaatttttcggtataattataataaggtgtttccggacacgaggccgggtagccgtcttgtctctgccataaccgaaaggtccagcgaacaatgaataacgcagcatcgttcagcagtcagaaacagtaactatgccgtcgtactgatttacgacaatgccgataaaataaggaaaagccgaaaagaggggcttgccttctttccggcttttcgtgaaagtcctattatccgggcttcccgttattctatacggtccagcctgcggacttctcttgaatcgtccacagacgggcataaagcccctcgtgccgcatcagttcgtcgtgcgtgccttgttcttttacccgtccgtcttccagaacgacgatccggtccgcattcatgatcgtcttaagcttgtgggcgatgacgatgacggtgcgtcccttgataagcgtgtcgatggctttctgcacctccacctcgttttccgggtcgagcgatgcggtcgcctcgtccagcaggataatcggcgcatccttcaagatggcgcgggcgatggatatgcgctgtttctcgccgccggacagcgtgcaaccgccctcacccaccatcgtgtcgtatccctgcggcaggcgcatgatgaaatcgtggcagcaggctttctcggctgccgcgatgatctcctcgtccgtcgcaccgggctttccgaaacggatattgtcgcgtatcgtgtcctgaaacagatagacgtcctggaacaccatcgagatgcggctcatcagactttcaggttctatatctttcatcggaacgccatcgaaaaggacacgcccctgctgcgggtcgtagaatcgggcgcaaagtttcatcaccgtacttttcccgctccccgaaggaccgacgagagccgtcagcgtgtttctcggaaacgcgatggaaacgtcctgaagcaccttcttgtcctgataggcgaacgacacatgctcgaaccggatgtcgccggtggccggcgcctgccgttcgccttccatctccggctcgttcatcagcgtgagaatacgccctccggcaatggagaagtagcggaactccgcaaagttggtcagcgccgaagtcagcgggtcgaacacgcgcgagccgaccacgaggaacagcacgaagacgagcagcgagagttcgcctcccaacagcaggtaggttccgcacagcaccatcagggtcagtccggcccgcaccaatgtaatgctcagcagcacgaaaggccccagcatggcttcctgacggatacaggcacggcgcagttccgcaaaagcatcgcgcaggcggacaaagcggtcgcccagcaggttgtaggctttcatcacgcgaatgccctgcaagtattcctccaagcggttcccggcattgattttggcttgtatctgcctgccgctcaactttttctgcacactcgtgctcatccataggacaagcaaggcgaccggcagtgcggcgaacatggcaacggccatccgccagtcgatccataccagcgagaggaatgccagcacgggcatgacgacggctcccatcagttggggcaaatggtgggaaatgcccgtctcggccatcgtgaaatcggtaacgagcatggacgaaagatcgccggggtcgcgccgggaaagaaatccgagagagagtttccgcagatgttccgccagtgcaatgcgccccgacgcactcatttcgtaggctcctctgaaattggcccggtaggaggcccgttcggccaaagccatcaccagcatatagacagccaatatgccgaaaatgcaccacagtcttgccgtgtcgagcggtcgtccgctgccgtcgaacgcggcgaagatgatgcgcaccgcctcgatggagaggcagaaaggtatgatgttgaccagattggcgagcatggtatagcccacgggcttgtaaagacgttccgtatggcctatcgtaatgtttttaatcgcattcatgttccactcctttcatttatgtgcgacgatatgcagttcttcttttttctgaattacccggatgtcggaaaagccggcttgggacagcaactgtttcagttcttcggctccgtacaccgtcattccctttatccgctccgtccacgcctttccgagttcggggtcgctcgcttccagactgatgagaaagcagccccctttccggatcacgcggaagacttcggccagcgccttgctgacggaagaccagaaatagacggtctcgaaggccgtaacggcatcgaaggccccgtccccgtaaggcagggagcagacatcgccctgctgtatgaaacatcggcggtccagttctcccgcattgtgcctgcgggcgaaggcgacgctctcctccgacaggtccatgccgtaaacttttccctgcggacacagcttcagcagacgcttcacgttggcgccgcccccgcatccgatgtccagcacattccattccggccgccagtccacctgtttcatgccgcgatgggccagcgaagcgtggaaacagttcattccccgcaaaatcatccgtccccagaatccctgcggacaactcgtattctgtaaaatatcgttcaagaaactattctttttcatatctccgtattcaatttttgttcaacttccaatgataagcgctcgtataggcatcccacatgttcttgtagagcccctcggcgacggataagtcgtcgtgctggccctgctgtacgatccgtccctgctgcaagaccacgatgttgtccgccgagacgatggacgacagccggtgggcgataataatcacggtcttgccttttatcagggattgaagggcctgctgcatcttgtattcgttctccggatcggcgaaggccgtggcttcgtccagtaccagtatcggcgcattcttcagaatggcgcgggccacgcatacccgctgcgcctcgccgcccgacagatacacgccctcgtcgcctattctcgtctcgtagccttgcggcagccgctcgatgaactcgtggcactgggcggctttggccgccgccacgaccgtttctttcgttgcggcgggggaaccgacggcgatgttctcgtacagcgtgtcgtagaacaggaacgtatcctgaaagacgaatgaaacggtatccatcaactgcgtcgtagcgatgttcttgatgttcacgccaccgatgagaatctcgccctgctccacgtcccagaaacggggaatcaggttcgcgacggtggacttgccgcttcccgaaggccccacgagcgccgtaatccggccttgcggcgccgtgaagcaaacatcgcgcagcgcctcggtacgtgtgccctgttccgtattttcgtaggagaatgacacgtggcggaactccacctcatacgactgcggcacttcggggtgttccggttcgggaacgggctttttctccagaatgcggtcgatacgcgccacgccttcgtcgatctccttggtgtttccgcccaggaacgtcagtttgtagatgggcgaagccacacccggtcccatgatgatgaaaaacagccatacggcggccaatgcgagcgactgcggattcccttgtatcagcaggatacccacgggaagaatgaacgtcaccatcgaacccagcaggacggtgaacgcgatcatcccgttctggtaggtgtcgcagcatttcagggcgaatgtcttgtaagcctgtatctcggcgttgaactgccggaacgagcggacgctctgtccgaatatcttcaccacgggcattcccctgacgtactgcacggcggaggcgctcatcttttcctgcgcatcatagtaaatactcatgaactcccgtgccttcttccccatgaaattggagaattgcagggcgaagctcaacagcaccacggccagacagaccgccgtcagccatgtatccagcgagaaaaagatgacgagcatcaccacgaccgtcgccactacgttcaccaaatcgggaatcgtgtgggcgatgaatccctcgattttctcgatgttctgctccatcgtcttcttgatggctccggtagaggtgttgttgagataacccagcgacagtttgccgatatgctcggacagccggacacgcaatccgtacagaatgcggaatgcagccacgtgcgaggacatcagggcggcgtacagcagcaccagtccgccgataagcccgcagaaggcgatccagccccaacgaatcatgccggcttcgtccaccgaagccgggcttgtaccgtgcgtcagcagctctttcaacacctcgtacaccgcccaatagggtacgagcatacacacggcgctgcctgccgacagcagacccgccagaaaaagcagccctttcttctgccccgcgatctcgaacaggcgggacagaccttctttcttcttttcttttgtttccatatattgaattttatccgattctctctatccgttgttggtaaattcctgtaaatcttccggccggattacaacagccccgtcagccgctccccgctcttttgtcagccggaaatcgcagcacgaagcaccgtgtgccaatgtgcgggtccgtgtcagccggataccgagtacatcgtgtgtgatataatcattcacgcagaaataggggaaaaagcactcgacgccaatacgggaacagagttcggcgaccgggcaccgggcaatgtccataccgacatcgaacgtatcgtccgcattcggcaacacgcaatcgaacagccaatcgtcctctgtggaaacatgcgaagcggaagcgatgcgacgcacatagtcgggcgaacacaacatttcgcgtatttccgaaattttttcagaagggatactcgacaacgtgagctttttcaatgctttctgcgtaacaatggaaagttctgccggactccatcctctggccgacagttcttgccacagaccgatctcataggctataccgataatgtttttcacccatggtgatgtcggcgggacatccggaatgattgcggagatacgatgaaaattctcgacagccgcttccatcacggaatcaacggattcgaccgacaaacgggatgccagttcttccctgaaaaattcttcgaaccgttccaacattgggagataaggttcaatcgtcgtctctttcatctttcatggagaattgccgccgtgtcacgggaattcgatacgatttcatatcccaacatcgaactgaacttgtagcacagccgcgtcatccgtcccaatatttgcccgaagaagaagccccagcgcggacggaaaaacttcatgtaattggcctgttccaaaaggcgtaggcggggttcccattgttctaccagacgcccgtcgctcagaccggagcggatttgcgcctcgtgttcacggagcgaatcgggtttcactccgtgacggctcatcatcgtaccgcagacgtcgaaccacagttcgccgcccccgaaacgctcggccacatggtgcagaaatgtttttacctgcttttcatagaaatacatcagcacgccttcgaccacgaagatgaaatgcgcatcgggatgccggcgacgcaggtcgtccagccagccggcatccagcagggaggccgcaatgtaggggttgcccggctgctccggaatcagctcgcggcgcagcgcgatgacttccggcaggtccatgtcgtagaatacggccttcccgtcgccgatacgctggaaacgggtgtccagaccacagcccacattcaccaccaccgcatcggcgtgcttccctatgaagcggcgcacggcacggtcgaaaaaccacccgcgcacgacgcagccgacctcgctcaacttcgccccgtcgaaacgggagtagtcgtattccagactgtccaccagcccctccgcaaccttgtcgttcagaatcgggttctttcggcggctctctttcgccctgtaatagagcggaatgagcaatgtctcggcgacaatgctctcgaatttatgtctctgtttcatttgttatgatatttattaatgaacgatattcagatttgttcacgaataaaaaaagaggaaacctttgtgaagatttcctcttttcccgctgccccgttacggcagcttgtccgtatgtgtcttttctatctgtcataccttgataatggccctccaaccttgaatttcaaacagaatatagtcatgcagaatggattccatttcctgtttgggcaccgcgtgcatcaacagctcctcgaacagcgtgaacatccacaccgtatgcaggtgaatgataaaatcggacacagccgtatttatattcgggtacttcttcttcatggcggcgaaccatgccttgaccagcccggtcgaacggtcggtgtagctttcgcgaaaatgttccagcgaagagccttgggcacggaacaacaggatctccagcaggctgcgatgcgtttcgatgagcgaaacgtattcgtcgatacaggctttcaggtatttttcggaacgcatcgtcatcacgtcctcgccgcgtatgccgtgatgctcctgcaacatggcttccatagcgtgcaggacgggacggaccacttcacagaacaattcgtccttgttccggaaataattatatatgttccccacaccgacaccgacggctccggcaatctcgcgcatggaggtcttggaatacccctgctgcccgaatcgctgttcggcgactgccaatatgcggccgcgtatgtcttctttgagtacctgcataaataatgaacgatgtttccgtttatatttttgcaaaagtacggggtttgaatttactggacaatacctatttatggtgattttacatgattgaaataagggaaaagcaggtattaccggaggtagcgaaataccttgtctatatccttgtctatatccgaaaggaaaagtcatattgttcattgaaaaggagaaagtctcatagattataattacttttgtacataaaacccaaagaatcaaatataaaatggcaaagattacagtaaaagacacaagtgtcacaattatatcagtcaacgagaatgattatatcagcctgacagacatagcaagatacaaaagcgatgacccgactgcggttatcgggaactggctgcgtaaccggaatacaatagaatatctgggtatttgggagagtttgtacaacccgagttttaaacccctcgaattcgaggggtttaaaaaggaagccgggctgaacgcctttaccttatcaccgacaaaatggataagtacgacaaacgcaataggcatactctccaaatcgggacgctacggcggcacttacgctcacaaggatatagcatttaagtttgcaagctggatttccgttgaatttgaactgtatattataaaggagttccaacgattaaagaccgaggaacaacagcaactcggttggtcagccaaacgggaactgtcgaaaatcaactaccgcatacataccgatgccataaaacagaaccttatcccggcagaggtaaccgccaaacaagccagtattatctatgccgatgaagccgatatgctgaatgtggcgatgttcggtatgaccgccaagatgtggcgtgagcaacaccccgaactgaaagggaatatccgggactatgccacaatcaatgagcttatttgcctctcaaatatggaaaacctcaatgcagtatttatagaccaaggtattccgcagggtgagcggttgattaaactcaatcagatagccattcaacagatgagaatattgggaactggcggcagcgaacgcaagttattaaagtagatgagtctctatcagaatttgtgccgagtacgtgatgaacaatacactatcaaaccatgacgaataaagatgaaatgacaatgaactctgataaaaacgcctattttctatcgcttccggagataaccgaattatccgttcctcctaaaacgatattgttggaagaaggcaaggtagccgacagaatgtacctgatccggaaaggttgcctgcgcctgtttttcaacaacgaaggacgggacatcactttccagttctttttcgaaggggatttcgtcgcgtcattcgacagcctgtatcaacggacaccgagccttttttccctggaaagcatagagccggcagaactgtcggttatgaagcgggaagattttttcagaaacctcggacagaagcccgcgctacggcagatatacgaggaaaaaatcatcgaacgcttccatgtttatcagcggctcttcctttcccgcataaagaacaccccccaacaacggtatgaagaactgctgaaagaacacccctctatcatacagcggattccccagcattatattgcctcctatttggggattacttctgtttccctgtcgaggatcagaaacaggcgatagttcatttctttacatttgttatcgtccggttccagtcgaagatgcgaactttgccgcatctattaaaaccgaaagacagatgaaaaagatttttataatagactggagcctgattcccgtgtttgtcctgtccgcatactccggaatcgaattgcatgtggccgactatgaaggcaatcacgaggtatggcataattgggcagttttccatgtcctgacgagcctgctgttcctcatggcctccatatttcatatagcgacgcattggggctggtacaagggaactgccaagaacggaataggccggaaaagcaaggtcacggcggtactgtcggtcctgttcctgtccgtggttctgaccggatttgccctgttaggcatagaaggagcaggttccccggtcgggcaatgtcatttttgggcaggaatcgttacaactgtcctttctatcggccatatactgaaacgccttccgttgctacgcaaatcattgaaataagcacaacctattcaacggacaacttccggacaaagcgttcttacagaaatcggggtacttattacaaatgcggcttcttgcttactgtcgagaagaccgcatttttctttatttttcggcatatcattcgatttcagcattgctcgtccaaccatttggggcatccggtccattcgttgccccttcaaatccggcatcagagaatggctgttgtcataggcaccgacttcatgcagttccacgaatgaggcatttcctccgtaacggtttatgtttttcacgagcttacggcctgtccggagaaaacatacgtgccagtttttcccgacgagattccgaaaagacattaaaatagttgaagaataaaatgttacgcatacaattatgtacagaatcctttcatttcgaaccatcatgccttatttataccggacgggggcaatgtcgctcccgtaaaataattaaggattatgataataggttatttaagggtcagcacgggcaaacagaacccggctaaccaacaagacgagatccggcgtttcgccgacagtagaaatctttccgtcagccagtgggtgacggaggtcgccagcggcaagaagaaggggtgcgaccgcaaattagggggactgatacggcgcatgaaacggggcgacacgctgattgtcacggaagtttcgcggctaagccgcacgctgacggacctcatggccatcatgggcaagtgtctggagaagggaatcaacctttacacaaccaaggaggggtattcgttcgacaactccatcaacagcaaggtactttgtttcgcgttcggtctggtagcggaaattgaacgcaacctgatttcgatgcgcacgaaggaggctctcgccctccggaaagccgagggtgtcgtccttggtcggaaaaaaggcagctacacgaaaatgaacgtgctgatcgaaaaccgaaaggtcatcgttggcatgttgaagcggaactgtacgattgccgatatatgcaggcgtttcgacatttcgcgggatacattcatgaaattccgtagccgctataaggaaatagataaggccatgaaagagaaagagataagacggaaaggggagttgcaaaaacggagggtatgattttacgttggttaaatcgttcgttttcagccacaaaattacaaaaacacgaattatccacaaaaaaaatctgcaaaaaattgcgtttcagttctttgagtaggacaaattttcccggagtgtccgaataatacgaccttttttccgatagtctttttaacgaacgattaaaccaacaaataaatcggcataactgacagttatccggctgattatttgttggttcggtgcttttttacctctaaagaaagaagcacggcacggacaaacgtacagagattgaataaatagctgatataaataaattggcatagacagaattatgacaatgaaacgaatactgttattatttcttttattctgcggcgggtatgttcatgcgcaagagttggactcggcccgtatccattaccggcagggccacagggaagtggacgtgctcttccgggacaaccgcgcggaactggagcgttttatccgcaccctgcgtgaagaacacggtgcggaccgccttgaaagcgtcgtgatacgctcgtgggcatcgcccgaaggtgtgaaccgtctcaacggggtgctgtcagagcgcagggccgactccctgaaatcctatctcgtgcgccacgccggaatccccgacagtttgatctgcatacatggagaaggtattgcgtgggacatgctgcgccagatggtcgccgcctcggacatattatacaaggaagaggtgctgcatatccttgaccatacgcccgtatgggtgttcgacaaggcaggtcgcgtagtggacggacgcaagaaacagctcatggacctgcggggcggtatgccgtacacctacatgctggagaatttctttcccgaactgcgctccagcctctcggtggcctgctaccggaaacccgaaccgcccgtaaaagtcatttcccaaaaagagacgaaagtgaaagagccggaaccggccctgcaacccgatagcgtggcggaaccggcctccgagccggcaacggtgcggaaggaagcgaccgtgcaaccgcatagaccgacagtacagcggttggccgttaagaccaacctgctctacgatgcgatactgatgccttcgctcgaagtggagtaccgtatcgccgaccgttggacggtgaacctcgaaggcgacatggcatggtggaataatgacggcaagcacaaatgttaccaagtagctacaatcagcccggagggacgctggtggttcggacagaagcaaggcagcccgtggcacggccactacctcggcgtgttcggcggcttcacgtggtacgaccttgaaaacggcaaagagggctatcagggcgaggccgaaatggtgggtgtcagctacggctacatgttccccatcggacggcggctctcgctggaagccggtatcggtctggggtacatgcacagcaagtacgaagaatatcttcccatcgacgggcactacgtgtaccagcagacaaaccgaatgaattacttcggtccgttgaaactgaagtttgcccttgtgtggcggttgtgggataccgataaaaagaaaggaggcgcacgatgaaagcaacgctacgatataccctcatggggcttacgtttgcaggattgacattcctttccacgagctgccggaaagacctgtgttacgaccacgacgagcatggtctttccgtgaaggtgaatctctcttccgactgggaacaggaatgggaacgtacttacgcctatgactgggaaaaattgtgggaagaggactggaagtacgactatgaagatttgtgtcctgctccggccgacggaatacgtgtccaagtctataccagcgacggacagcgtatagagagcaatctgcccgatgaaggaggacggatcgccatgccggaaggcacgcacgaactgttgttctacaacaatgatacggaatatatcgtgttcgatggcgtggccgcttcggaatccgccacagccaccacacgcggcgtgacccggagttctttccatgaattgcacgcgggggaacgtaccgtgaaccagcccgacatgctttacggggcatacatggaagaatacacggcagaaaaaacacttgccccgacggagctgccggttaccttgcgtccattggtttacacctatatgatacgttacgagttcgaaagcggacaacaatacgtggccttggcacgcggagccttggcaggcatggccgaaacggtctatctgaacgatgggcataccggagaaaccgcagccacggtaatgttcgactgtacgctggaagattacggagcggaagcgctggtacagtcgttcggcgtacccgactatccgggtgaacattacggacgaaacggtacggacgggcgaaggtacagcctgaacttggaggtgagaatggtgaacggcaagttcaagaccttcgagttcgatgtcacagaccaagtgaaaggacaaccacggggtggcgttatcgtcgtgagcgggctgtcgatttccaacgacgaggggctggaaggcggaggcagctttgacgtagatgtggacggctggggagaatgggtggacataccgctgcccattgactgaaacgaataaaacaacaggtactaaataaccaaatttttaatttaattttttacatcttatgaagaaaagtttttttgtgcttggagtggctgtagcagcactggcaagctgtacgaacgaagaagttgtggatatgccgcagagccgggcgatccagttcggaactttcgtgaaccattcaacgagaagtagtgtgactgaaacaacggagcagaatcttcagaagttcttcgtattcggaaactatgatgattcatggacttccgtatataccaatgttcaggtagacggaggcactgtaggagcggaggggacggtttggaatcccacacagactgcttattggataaatggcaagaagtaccgttttggcgcttactccaatggtggtaataaaattgagaatgcagagtttaatgcaacctctcgagtgttgacattcccaaattactcggtagacaatacgaaagatttgattgtggctataccccaagaggtgactgcaaaagaagctaataatggtccagtaaacttatctttctaccatatgttgtcgcaggtgaagttcacgttcaagaacacggacgcttatgactacaccatgaaaatctccgacatcaaggtgaatgcagtaaaaacaactaatgttacagcgacttatgccgaaagcgggaaaccagatatcaattggactactcaaagtgtttcaacagaggactatgatttcggaacattaggggatattgccgaagactttaaggacgctacccacactacgacctgctttgtcattccacaaagcaacgaaaatctggaagtaacctttaccgcaactttctatgatgcagcaaataaacaattaagtgaaaatcagttcaaaggaaaattggcatataaaggcgatgttagcggcacagtacagaaccaatggactgaaggtttcaaatataactatacagtagaaatcaacggtagcacgattgatccggagttgaaggagcaggtaattgagttcaaagttattgatgtagatgaatgggctgacgcatcaaatagtgatgtaaccccggaaaacgccggagagtaatcgcttgcatcaatagccgaaaagacatcacatcaggctatgaggggttgaatgtcccctcatagccactaacgggagtgttgctccttatttacgctaccggtagcgtcagaaataaccggatataaagaaacaatgtatgattatgaataacaacctattcaaaaccttgttcataccggctgtcgcctgcctgctgggagcctgtacggaaagcacgggcccggacatggaaacaagcggcaacagcggggcgatccgttttgccggtcccgccgtgacacgggccgccatcgacgacgcggacggaatgttgaccgatggaaactcgttcagcgtatgggggaactacaccgacggaacgggcggtacggccacgagcgtgtttaacgccgaaaaagtgacatacgtttccggcatgtggggttacgagggcacgagatactggctccccggtaatacctacgacttctacgccctttatccgtctgtggaaacgctgggcgatgccgtgtcctccgccacctgcacggacggcacatttaccgtcaagggcttcgacgccacgaaaggacacgacctgatgacggcgaaaaagacgggtatctccgtcatggcaggccagacagagcctcccggtccggtagccctcaaattccaacatttgctggcacgcatcacctttgcggcacgcagtgagggtggcaacgccacggtacattccatctcccttgaggggctggatgtcaagggagattacgacagcggcaaggaacccctgtggagcaacacggcagagggaaccgtcagcgtggagaaagagacttccgtaaccccagccggaaatgcggacgtgtcgggcgacctgctactcattccgcaatcgctcacggacggggtgaaactgactgtcacctacgataccgatgccgagaggggaaagaccgcttcctacaccttgcctgccaccaccgtgagcatgtgggaggcggcgaaccattaccgttactcgttcaccctcaccggcggaggctatatcgtgttcgactcgcccacggtcaacgcatggagcgacgccataggcgggaacgtaaccatcgacgtgacccaataacccaattataagctatctgtaacttgacgataaaatgaacatccaaatgaagcaacgatacatacttccggctctcctgcttctctgctccgcctgccagcaggaggaatgggcgcagcccgaagccgacagtcccgacgccatccactttgccgccccggccattaccgtggagaaactcacccggagcacgttccacgacgcattccccaccggcggcacgttcggcgtactgggctactgcgtgccttatcagcgtggcagtaacaccgaaaaggactgggcatcgggcagcgcgaactggggtaacaagagcggcaacgccttccccgacgtgttcttcaatcaagccgtcacctacaacggctcggcctgcacttatgactataataacagtggcggcccgcgaaaatggtacaacacgacggaaaatccggcggcgacctcccccgacagctatcggtacacctttttcgcctattacccgaaggacggttttacagtggaaagtcccgccagcgccaccacacggggcgtgccgaaactgacgttcaccatgccgttcggcgagacgggcgatgtagcgactaccacgttgaacgacatgcagacacccgacgcgatggtttccgtcgtctataaccacctgcgtaccacggggaacgtgggcttcaatttcagccacatcatgacgggcttgggcttcgccgtgaacaactacaattacggagatgaaaagaaggaaactgttaccgtcaagcgtgttaccttgtcgggccacttcacccgctcgattaccatcgatttcagcaagaataccaacgaagagggattctacacctacagcggcacctatcccggcacatacgagatatataacaacgagacagggcttgcagtagctcccaacagttccgtcagcccgataggcgacaagcacctgcttctgttgagcaacgccacggacggcacttatttcggcaaggacgtggaggtttccgtcgaatatacctacaaaggggcggataagaccgctacagccgaacgtccgacacagttccagccccgtgcgggtgtccgctatacggcgcagctcaacttcgtgggcgaaaccttcgcgctgaactttattgccgccgataacgagttctgggaagacgggggcgacagcgacgtctctatccaataaaacaacaaccgaaaacagcataaagatgaaaaagatactttattatttcctgccggtggcctccatgctcttgccggcagcctgcaccacggaggaggactttggcggcggtaccgttccgcccggcgacggattcaccatcgaggccgtctgccagaacatgctgccgcagcaagtcgtcacccgctcggccatcgccaaggacgacaaggagaagcgcatcaaccagctctacctgttcttcttcgacgaaaacggcgactatctggaatcgagcaacacgaaagtattctcgccgtatatggctccgtcggcgaatacgaccaatgtcagcattcctacggacgtgtttaaagatccggcattcgcaaaaaaaactaccatctacgctttggccaacgtgactccggaggtggtaactgatgccaacggcgacggttatcccgataatttcccccaatatagcaaagacgggaaaaagcccaaggagctgctcgaagcgttcgtgtacgatcctgccaattatactcctaacacccgcgatgacatcacgaccctgcccagcacgggaatgccgatggcgggcaagagcgcgaccgtgaacctcaccgagaagggaagcctcacgatgcagctcaaggcactgatggcccgcatcgacatcaacatcagtatcgattccgaccactcggacgagagcggacaactgccccgcctttccattgcggaatggggcgtgtacaacatgcctaccgccgtacccctgaccgagcctgccgatggccagaccagcctgactaccgatgagccataccgcaatgtagaaaacatacagagcgatgccgtcgtttacaaccacggcggggccgcctccctgaccttctacatgttcgagaacatgattgaaccggacgaagatccggaaaactatcagtatccggctggagtagaggacgatgttgacaagcagcggtggaagccgagacttgtaggcgaaaacagcaaggctacctatttcaagatgagagcctactacactacctataacggcgacccctccctgcccgcaaatcaggataacaccaccatcgaggccgaatataccttctatctcggaggcaacccggtgaatgacttcaaggtgatacgcaacaggcactacgccaacaacatcgtcatcagcggactgacccatgtgggcaacaacccggaccacatcaccttcgatgcccgcgtcaacatcaccgagcagaacaacccgttctacctgtccatgctgcgcgagcgtgaccacgacgcccacttctgtatcacacctttggacgtgtacctcttcgaggaagatgagaatccaaagatgaaagtcagcatagccgacccggaaagtcacacttggatacgcatggaacgtgtgccagccgaaaatatggagaatggaacactctctgccgacatgagtacagatacccatttggcgaccggacagaaatggactgcgggaaacggcaaacgcaaatacttcaccacggacttggtgaccaacacccttgcccaaaacaccgaatacaccatcagcaggagccgtgaccgcatctatttctacttggacgaaaacctaagcacgaaagaccgcaccgccaccgtcaacatctcgtacaccgacaacaacacgcagacgccacgtacccgtaccattgaaatcgtacagcacggtctgttgccggtacagtggtattatgaaggcagacttcaaggcactatctacgtggaagcctatgaggaatatatatcccattacgaccccctgaacgagtttgaaggggattatatctatgacggtttggaatggggttgtaatggtgaatacatcggaggtccgctaaataacgaatggacggaaggaaacaaacatggggcggcagctacccggcgcattattacccaagctggacaatcagaaatgaacctgaacgaaaaaccccgctcagcggcggaatattgctataacaagaacaagcgcaatgccaatggagccgtacagggcatgagcaattcttccggttggttcctgcccggtatctcccaactggaaagtattcttacctcttattacaatacatacacggagttccagaacaatttctactggtcatcggcggcagcaaaagatagaacaggaatatggcctgcgtatatctatccagagagcaccagctatgcccgtgccaccaaggccctgccagacggtggttatgcagaaagtgattgggacgatatatacacgaatgataacggcactaccggtaaagcaccccgcatcaatagacctctccgcatccgtgcagcctacgtaccgcccagtggcgtaactatccagtgacaaccgccaaactttaattccgtgtcttactcactgcccgtctgtaggaaacccctctacaggcgggcagtgctgtttttattctcccggtatgtctttggcctgtacaaccgacatgcacacgcacgttttatacgtcggtcgggatagaaaaaggtgtgacaatatcaaaagaacctattcaacaaaaagaggtttgtagcctccccaaaagcccctcaaacctatggcaaaggcatcaaggggcttttcttctatcagcgaaacagtaatagacatttgggttcgcgttatctgattgtgtcgtccgcaaaacaccttcggcgtcggaactttatctgtcatccgacagaaatacgataataaatataggatttctttaccgctttttatttcttcttcaagaaacgttccgtgagccatttgcgcaccgggagatcatagcacttcaggcaggcataggcaagcgcgaacgccccgacgaacgtgagcagcatgtaaggaaggccttcggcaagtgtcgcctgacggttgaacgcccatgccgtataaatatagaccagcggatagtgggtgatatagacgggataggatatgtcgcccagaaacttgcatacggcagcggagcgtttgcccgttatcctgcctcccgctcccatcgagacgataaccgggaaaatgcagatgatgcagaaagcctcgtaaagcccgttcatccaatacccgtcctccccaccgatacggggcgcggaaagcacggcgattatcatcaggctgcaccacccaaaagcattcttgcgggtgcgtatcagccagccaagccgggacaggagcagtccgccgaagaaggggtacatcagccggaccagtcccacgtactgctgttcccagttcaaagcccatccgcccacgatgtcgccggcaggtgcggtaaggcagcggtgtaccgtgaagcacgccgctatcgccacgaggacagtcaatgccgtcttgctgaacttgcggatgaacaaggcgtacaatatgttgccgatgtattcgtagtaaagcgaccatgccggcccgttcagcgggtgcatttccatccatccccggacgtcccacttcagcggcagaggcagcaacgtacaacccagcagcatgaccagcagcaccgcaccggcggacacgccctccattgccggataacagggggcatcctgaaaccaaaagagcgcggctcccacgatactccccatgaccaccataggctgtagccggataagacgacgcttgaagaaggttcccgtgctcatccggttccaacggtcatcgtatgcgtagccgatgacgaagcccgaaagcatgaagaagaaatctactgccagatagccatgattgataatctggttcagatggttgccgccggagtgcgcttccagcagatgaaaggccactaccatagcagccgccacgccgcgcagtccgtccagaatctcgtagtgcggcttcgaggtcaaataagagttttgcatgttcatgaattataccggtaaaagactgaatgcaaagatagtatataataaataattacgatgttcgttaccgattagaaaatatcaaacagtcagatttccgtttaaaaagagagccgatcttcacagacaggctctccataaacgaaaaaaaatgtttttatatcgtatgaacaaaaagtattatttgagatgcagcacaacctttgtatggcggttggcctcattgggcgcataatcggaaatgccgccttggtgagttttggttatcttgtcgcccgacaccccacgtttgattaattcttcagcgatataatcggctcttgatgcactcaagacattgtttacggatgctgttccggtcatactgtcagctgcaccaatgacgcttaccgataacccgtacttcttcgctactcttgccaactcgtcgagattaagcgtctgggaggtatccgtgagacgcgccgtattgagttggaagaagaaatacacgggtgagccgatacactcttttccgttctgcatacgagccaaatattgcatacagagtgtgtcttgacccgcacaaaggggaattgtgtcggcagattgtgtacccttcccatccaagggagatttcccgtcccacttccggttcttaagtctcgcttgaagcgagttcagaccgctgtaattgtttttgggataacggttgccgtcgaatgcatcgtcgtcatcaaaaagatggctgtacttgtcgagcaatccttcgatttccagaatctttttcagctcagcgagtgcccgtcggtctctgtcatgctgccctgcataaagacggttctcttccgacaaagcatttacgcgctcgacaagccactgatcgcggcggatataaggacttgggtctatggcgcgtttccaaccgaccctgccgatatgaaaagaaaatccggcggtaagcgataacatgtggtcaccaaaacggttctccttaccatacccgtcgaaatcttggaaagtggttgcgccggagagttccacgagggcgcttacccttttggaaatccggtactgcccctgtataccataagagactgcaaacgggttatgcccgttggtcgcatgatgcagcagcccgataccggcaaagggagccagatgccagcgtacctgttcctgacgggaataactgccgccgagcacattccatagcagatccgcatggaggtggtggtattcctgcacggccagcgtaccgtccttgaactgcaagccgctataatttatgcgtgcgcctacccacggggtgaaccacttgccaatggcaaggctatacgagggtttcaacctcccgaacaggtcttcgcagccaagcggggtgccgagaaaggccgtcgtgcctccggcgatactgacgaaccagttgccgtttccccgtgccgggacgaccactccgtcaagatatgagggctgtaacggctgcagcagttcagtgtcatcgtaacggaacatgcagcgtacagtatccttctccgtgggttgtacatccgcacgggcttgcagcgtacagaacgccgcaaagataaagatgatattctttgtcataattccaattttttaattgtaatctattcagttttcaggcaatctttgccatttatcgtttgggctttttgccgatggccggacgcatcatgcggctcgccattctcatgcagcggagcgcccatgcccggttgtcctcgtcgtcatcgcgtccccatttgaggtcactgccgccaccacctccgccacgtgtttcggcaaatgtagtggcatcatcgaccatgccgaggaacaacagtgtggcgcagtgcatgacttccgtgccttgttctgccacggagcgcacgagggtgccatcgaacagttgccgttcggagggcttcatacgtgccgacagttcccgccactcatcgaccatgttttccagcatggcatccttgagcaggctgtccactttggaatgtacatcacgggtgtattcgtaggcttcttccttaagctgttccgtgcgttcctgaatggcatccatattctctttgaggtcggaaagctgtcggtcggcagtctgtaacttctcctgtttgtctgccagtttcccttggatagcgaccagttctttttcgagtttctctttctcggcggatatggccaaggcatcgtcttttcgggagttcatgtcattttcgagtgctgccagttgggcctccttttcggatttctctcgtcgcaggttttccaccattgaagtgagaccctttaccctgcgctctgccagccgtatatccgaatgaagatcggaaagcactttttggtggcggtcaatattctcctcgatagttgtacactcttccgagagcatacggcggtattcttccgtcgtcctgtgccgtgcgccggtctcggcgacgctccggcctctcgccattccccatttcgtgttgacctcggcgaaaaagtccgtatggagctgtttcattctcgcactatattcgaacttgtcctttccggcgaatatctccttgtacgcaaacttcccgtctttgattggcagaagcgtgcaatgcacgtgcggattcaactcgtcgaggtgtacaatgaaggcggcaacattctgctctccgtatctgccacaaacgaatgaatagacatcctttgcccaacgttcgatgtcgctcttccttttgatgctggtattgtccgcacctttttcaaaatccaccttctgcgtaccgaatgcgagttcgtgcatccgctcccgcgaacctccaaagatgatgtttaccaccgtgcggtatttcggttcgatcagtccctcgttggggtcctttattccgcgacggcccaatatgtccgccatccgttccgggatattacggctcgtgtcaatagggcgtatcttgcctccggacgcaatctcgaagttcagatgtttgcgagtgggatcgtagttgcccttactcatggcgtacttctctgcctctttgctgcgattgcgcagatgttcgttgccttgggcggcggtgattcctttcgacacttgaacgtcaagaacctgttttgcatttgccatactgcttccgtgttatttcggacaatcccccgtgtcccagcttgctgcttgtacggacacccttcccaccgacgaatgtcggtcggggtattaggctcccccttccctttgttcagtggcagacgggcaagcccggatgcctgctataactggaaggatatttggaccggaaccggggcaaattacccgtggttatacaatctttgtctgcgaatccctgttcaactttcttcctgcgccttcgctaaaagcgatagaaagggtttacgaagcgattcgaggcgttccgtctcttcgtccataccgaaatccgttccatccggctttccgtcgataacaagctctgcaagctctttcgaggcttcgatgaacgccgcccattccccaccgagatcggaccggaagaactgcacgagcggtgagccgtcgtcgaatctcgacttgcgcagaacccgccatagggcggcatgggcgatacactccaaaacggtctcacgcaattgttcttctgatcggagggtatgcacggatgtcgtgccggaatggttgtccggataggcccggctgtcctgtccggttatctccgccaaggtctgacgcatgatttgtccgcatgatttgccgacatcgaaagaagttgctttgccaatcacccaatcgtacaatattccttgtattcttgtggcaaagtccgtttctttctgcccactgtccggcatgtcaggcgtgccgattcgcaggtgcatggtaatgatgacgcttttcgccagccggatacgttccaactgcccgaatgcttcgagcgtgtccagaaacgagcggacggtggcgcggtgccaatgccactcggatgcaaggtcggaaacggtcacatggcactggcagggaccgaggtcgtagtcttgtttccttaaaaacggggagacgaaacctgccagcgatttatccaacaggtcgcagtaggcttctgttcttgttttccgctcgccgactttttctttcagatagtcgaacacttccgtgttggccagtatggtggcgggtgcttcatttctatttctcattttcgttctgtttttgatgattcatatcgtgcggattgtatggactgccattatccgcattatcatggcagtcttgcgtgatgatactatgataactgtcggctaatgctccgggatattccagccattcgaggaatttgcgcatgtctgtcctttcggacatgacccttgccgacgggtagaacagggcagccaaaagaataaaggcgatggttacggacatcgtgtacagatgcggcacgaagccgatgaccaatgccaagagcgcaaaccagacgaaacgtttcggccggtcgagcaaacagcgcatccatcggtccgcccgccggaaagaggcccatgcggcacacacaatggtggatggcacaacaccgaactcgccggggtgtccgctcgtatagacataatggaagaggagcaatacgataagcagcacatgggtgtacaacctgcgggccttttcgctccatatcattttatcgtagaattttgccatgaagtaacgtctgctcctgtacaacagtgccggaaggacgacaggcattgcaagaaacacaaactgtaatataatccaagtcataacaggtaatagggttttgaaggtatgtgaacgggccgtaccacgagttccaagcggacaatcccgtgggtggccaagcggataatgttctcggtgtcttcagctgtcagggacgatgcgcctttcttcatccgggacttgaatatgccgttctgcttgcggtatgtagccagtgccgcgtccagatcatgctccggaatcgtccacgtcatgccccggtcgtatgtgccatgcggtttgcaagcacgcagtaccagcgtgcgggaaaccaggaaatcggtccggttgttcctcggaatgacgtgctccttgtagaggttgtcatcggccacctctatccatgtgcggtatgtgtcgatgcagaaaatcatctggcgatatatcgtgtttcgcataggaactgttttacatgaaatccaacagcacgtcttccagctccttcttgtacttgaagctgccgtttccggtgtggagtttcaagtcgagagacaggtcgccgtacatcagttccaacgaatcgtaaacggtcgcgatgacgcggtttaccttaccgtctgcgtctgtccgggcgttcatcttgaacatttgtccgaaagcgggattggagtaggcacaggtgctatgaccggatttttccaatccgaccggcacatggtggtagagcgtgatcagctccatgtcgtcctcgaatatgtccatgacctcctccaaatcataggggtcccgcaacgggaacgtgagcagaacgtagtcgccgtaaaactgcggttcctccattgtcgccacattgagaagctgcggcatttgcaggggtacgaacgacataaagtcatccaaaaagtgtcgtaacataatcatatatcgtttattttgtgaacaggcttttacaaagaggcgatgaatatctccatgagcataccgggcagctcgtccaaccggtttctttccgacggcaggattttacgcagtgtctcgaaagcgccgggtgtctcggtcgcaatccggtcgagggctttcttatcctccggagagagaagcgtcatacagaggccgtccaaggaagcgtagggctggagtatcatccaaatgtaggcgtgtgcctgttcgggtgttgcgacttcgccccgatgtatgtcgtcgagacaggtacgcacgttctgtatcagtcggcggtcggcacgcagggccatgtatatcagggcctccttgtaggtaatctctttgcgtccggcggcgagaaacacctcggaacagcacttctccgtgtcgcaggtaatgtcggccatgtttgcactgccggaatcgtgcagaccggacagaaaagcgcgaaaaacggcgtcttctttctcgatgaatctcttgaggtcacgactgtcgtgtatgccgtcgttcagggttccggcaagcaacttacgatatgccgacagcgtttgctccttgttgccacggtaggcaggccgtttatccagtgctgcgaaaaacggacggatctcctcggcggaacggtgcagttccacgtctccggcatagggagagaaccgctctttcaggctcaacacttccttgtaggtgcgcggtttcgacagggtcaaccgggaaagttccgagcaaatggaatcgtgtaacagacgacattcttcccgtgtgccggaatgggtctgacgggccgtgtcccgccgaatggctgcagccacggaatctttcaaggtttgccattccccgatacatacggtcagctcttcaaaggaaagttcttgggacttgcgtatctcggagaggtactctctgtacagaccggcaggcgtgtcttggggttccgccagtgatttgccgttcggaccgtcgcatgacgggaatgtgaaaacggcaattgaagcggcagaaagtccagcaatggaaagtatgatttttaagtatgattttctattattcattgttcaattttgaattttacagcgcaaatctaagtattattttcaagatggcaagtgttgaaatttgttttataagctatttttaacattgtacttaatagtttgattttcaatgaaaacaagtgaagaaaacgggaaaatccaagtgctttcttcgattttccactcaaagtatggtttagtttaaaataaaactgttatatttgtacttgttatcatagaagtgtacaattagatggcaaaagtaggttacatatttaaggcggatcgttacgacgggttcgaggctgacaaagaatggatgcaggagtacggctgtgtacaagtgatagaggaaccggtcgaaagcgaggcgctacggcctaaatggaaacagcttgtggcgggcctcgaaaggggcgacgaggtagtggtggccaaattcagcaatgccctccgagggtcgcgcgaactgtcggccttcattgagttgtgccgtatcaaggtggtacgcatcatatccatccatgaccggatcgactcacggggtaaactgtttcccgaaacgacggttgccgatgtgctggagatgttcggggcgcttcccgaagaggtggcgatactgcgatattcgtccgcacgtgtcttgaacctgcaacagaaagcgaagattccgaagaaaacgatgaaggctatggacaaggccgacaaggaaaatactatcgttgacatgtatgtcaacggccattcgtttgaggacatcatggcggtaagcgggtacagcagccgaagttcggtgttcagcgtgctccacaggcatggggtaaaactcaacagggggaaattcagcggccccttgggaacccggaaaaagaaaaaggacgacagtccggcggaagaataacccgtaaaacgaaaagggtggcggcaactaccgcttataaacggtttaactgtcggaaaacgaggttgaaacggattcgcactcttggtaacaaacagcagatgtttaatttattaatacagattaaataaaaacgtagtatggaagtaatattgataatcgttgtgttctgggtagtgggtaaacttctgaaagcggtgttcggcggttttagcaagagcgactaccggcgcgaccagtaacacgtatgagacaacgacggcattgtctcgccggttctttcgtgccaggagtcggaatatgattcgtataaatcaaaagatgaatgtagataaatgaaaacttaccttatcttgtttttggctatcgtttttgaaactgtagccacttctttcttgaaacagagcgaacagtttaccaaactcgttccgtccgtattgaccgttctggggtacgcggcggctttctattgcttgagtgtcgtactgaagagcattccggtaggcatagcttacgccatttggtcgggagtgggtatcattcttatcgcgcttatcggctttttcgttttcaaacagcacctcgacctggctgccatcatcgggctggtcctgattattgccggagtggtcgtcatcaatgtcttctccaactcggtctctcattgatggaagtgtcccgtcattgtgttctataccaaacgaaaagaaagaaatcatgtttttcatcagcatggtttctttcttttttcagcattataggaaggagtcaaatatatacattcaacataagatacaagtatgccttttcgtccttactgttatgatgttcaagttcgaattgtaccttatcttcacgggccaaccagccaatagcactacccaactcggcatcatccatccctgtaattttctttatctctgaaaattcccatttacggagatggtcactattcaataaacgccaaactttaccagcgttctcgccaatgatgtatttatccataaattataatatatttattgttatatgtatataatatgttatacaaatgtacagttttgataacgaattatcgtttatgttccattaatgtttattaatacatcatgcatttggcggaatttttattccagataactgctcagaatgccgctaccaatctttaaacttttttaacagcggcattttacatggaacctaaatccgaaaaaattgcctgcaaattatggcacgttgccgggaatatatccaaaatgtaacgacaatcactaaagtcgtcagaatttcagacaacggtaaggcgagccaaattccttttactcccattatggcaggtaataccatgaagcacggaaccagaaaaacaaatccacgtaagactgcaaatgttatggccggctttatccgttccatgctctgataatatccaataatggagagattcaaaataaagaagatgaatcccgtgccataataagggaatccttctatcgctatgcgtgcggcagtattgtcaatgcgcaagaatagtccgacaagcaattcaggaaacaggataaaggcggcagtagaaatgactccgcaaactaatgccgcaaacacggaaacgcgtaaggcggaacgaactctttccgtgcttcctgtgccgaaattgtaactgataataggctgggcagattgggcaatggcgttacctatcatgaagacgaacgggagataataacagcttactccgaaagcacctactccgtcatctcccaaatggcgcatgaatacctggttgccgatgaacagcaatatcgccattgtcaattcgcctaacaaggcggatgagcctatcttgcactgcattcctatatcatggaagaagaataaaatcctttttctacccggacggagagaatgcaaacgagtgtcacgggcatagaacaacaagtaacccatcgtcaccgttgccccggccaaacaactcagggaggtagcaaatgccgcccccatcactccccagcccagcgggaagatgaacagccagtcgagaacgacattcaccgctgcggctatgatgctgcaccacatggcgagtttcggagcgccgtccaggcgcatggcaaacaaggcgacggcaatccacaactcgaacagcagagacggggaaaaccagaccagataatcgacaaccagcggcagcaaatgctccgacgagccaagcatacgggcggtttcttcgggaaacgccagaatgaatcctccgacggttacggatatgagcgtcacgaaaagcatggcttgggtgatggtcgcacgtgccaaaacggtttttcctttcgacaagtaaatggaagcgattacggaacaacctgcccccatcatcagtccaacacccatgagtgacatcagtagagggacgcagatatttacagctgcaatcccgtcgctgcccacgccgtgtcccacgaaaatcccgtcgatagtcgttaccgccgacatactcaacattcccaacagagtggggaaaaacagtttcttaaacagaacggaaactctctcattcccaaaatcaatcactttttctttcatacgtctttgtattttatattatatggtttacttccggcagaaaacgacggaagccggataagacgatggttttacccagtcatcttatccggcttccatagccctccgatgaggattataaaatgtcctttgcgttatttcgccgcaaaggtgggccaaagatttgacttatccaaaaaaagttgcatttttgtacattgctatttaattcttatatatgacaaaagcagaaattgttagccggattgcacagcagaccggaatagagaaagaggtcgtaatgaccgtggtcgaggcattcatggagaatgtaaaagatgcgatgattgccgggaacgaagtgttcctgcggggtttcggtagcttcattatcaagcaaagggcagagaaggtggcccgtaacatatcaaagaacacaactattgtgattccagctcattccatccccgccttcaaaccggcaaaagtattcctgagtgccgtaaaagagggaaaataaaggacgtgtaaaagtttcattttattttgtagatttgtatctattagcgatttaagagggattaagtttttagtctaaaagataatacagaattgttatgattaaagaattgagagttggcaattacgttgcttataaaggtaaaccatctttggtttgtgcattggattatgatcctaagttgagaaaagagaatatatccgttgtttataaatggggagaacctccgtataaaacaaatggagacattcagccaatattacttactgaaaaattggttttgcaatgcggttttaatcagcttgacgattatacatttgacaatgatgaaatggagattacacaagactgggatgatcaaactgtatattacattaccactcatgctaatgaatatacggtaagcggacaccgcatagaatacttacaccagctccagaatgcgtatttttgtttatctggtggaaaagaattagaagttaacctataaagaaaagaggcttttagaactgcctctttttctttatatcatgcgagggtattatatatttaatccgtcacctcccagtaatagcttaactcgttccctttcagattctctttggcgtattggtcggcttgttcccaaagagtattgtaaagtaccgccatatccggtctgttttcatagtattgccatatcttatggttaagtaccaatgtcagttccgtcaagaacttatagtcccctttccactccctgaaagcccggttgaaagtgtccaaaacagccgccaacccaaatctgtccgctattgagaagtcttcccaaaaggttgtttgtaactcataaccgttctcttgcataaattctttaaatgtcatacgctctaaattttaagtttgaactattttttgtttttccctttggtacaatcctgtaccgaaaggttgattatttttctgcctataggattgacggtcggtccaggcaagaaggctgcgaaaaatacactctccaacaaagtcggggaggaagatttttcgacagcaagcgtaagcggttcttgacaggacagacaagcggcaatcgaactttgcagaaaaaataagcgggctttcggcatggagtgttgggaaacggctgtaaggaggataaaacgggggaagctaaaatgttataaaaggattactttccggctggatagtcacggtacaaaggggaacggaccgcgtttcgataaaagggaaagagccatgaagatataaagggggaattccggcaaaaggattcaggacacatccattgtcaatgtatcccgaacctgcaccggtcattatctgtaccgaatgtttaggaaacccatttgtaaccttcgtccgtcagttcaaaatattcgtccattcccggtttcacaaaaaacatgatttcaaaggcttcgttgcttctaccttcgggtatcgtcatgttgatttctccattgcgggctgttcctcttcccgtattgaaacctaagtcttcgtccgcataggcgtaatggaattccacatccggaaatatctcggaaagtttttggataagcagtggcactccattccatgccgtatcgaaccaaagtatgttcggctcttcaaagtcttggtgataggcattccattttgtaccccatgtggcggtagaccactcgtaccaagtgggataaccgtactttttccgattttccaaatacgatgctccaagttgcagcgcttcttttctgtccttttccgccaatccttctatccattgaatggttctcaaagcatcatcgtccaataaaaaatagaatggcttcaactgcattgcttcaaggtatttcatacccaaatctccactgctgcttttttctatcaacagttcttcaggcataggaatgatgttgttgaagtcgatgtaacaaggcgtattgtcatcatcggttttaccttttaagaaattcattactttttgtactgtttcccggtctgcgtttatttctaaacggtttgtcacatgattaggcataatcttagttttttgaaattgttaatacttattttcccttttgtcggttctttcttcctgaaccgctttggggttttacggatgcggtacacggctgtcgggaaaacttcatacggtggctttccttggaaaattactcttaccccggtaaggaagaattttgcaagaaatgcacttcaagccaccggatcaagtgcgacggcctacctttgcatctggtaaaaccaaaccggtgatggaaagaagaaaagacgggagatatacgaaagaccggggtcggtataaaaggcggatattgctccgtgagtagtgataaaaaggaatggagctgattataaaaggagacggttctgtgtttcgcccattcgataaaggataccgcaaccatctctggcggatgcgttgcggtattttgtggacagcattttatgcggccttgtccggcttgcgctgccttgttttccagccgtacacggcggctacatacggatagagggaacgtgttctccggcggaaaccttcttcgtcgatttcacggttgtaaatcttatcggcgatacgctccgcttcatcacggtctttggcgatacgatacaaggtgtagttcgtaccgtcatgatggcccatccgtccgcgaatgttatagccgtcgccgtaccattctgcatcgtcgcactgggatttcaaaatatcggcaatggtgctgcccaatatttgatagccttgtctccggccgttccataatcccaagttgccgaacacgacaataatgccgtccacttctttattcagattgctccgttcgtcgtccagccagcgatatacttcttctgcccattcttcatcgctgacctcgtaacagtcatcgtccaatatttcccgttgtgaattttgatagtattcttttgccgtttcgtccaacaggtcatagcttgaccaaatcatctgtttcatacgtcttgaattttaagtttgacttttgtttttttatccctgccttcggagggtttccctcgtccggcgggatttgattttacgtgcggaccacaaggcggacagaagggaaacaaggcaaggaggaagcggatagtcctatggacgatttcatttgtgttgaacaagtattgacgagcttgcgagttgatggttgttaacctcaaatgaagccgcgccttgccggttcccgaccgccttaactttgcacgggaaaatcaatggacgacggcggactcttcgtgtggagtatgaaggagtataaaagtatagacgttccggaacggtaacgagcaaaacaaaagcggccttcgggccgctttgtctcaaaaaggcaggaattacttcttgcccttcttcggtttctttgccggttccgcaggaacttcctcctctttatcgacagccggataaaatttgactgcaaccgtcacgatgcggttgtgcagcacgccgtctttgtcggtccattcttcgggtttaaaatagccctccacggtaagcagcgtgcccttggtgagctggtcgaacgacccggtattctcgttcttgcgccacgcttcaatgttcatgaaagcggatatacgcttggtatcttcgccgttcttctcctgacgggccactgccagcgggaaacgtgcgacacttgtggtggtgaactgacggacttcggcatcttttgccacgaatccggttactgcgaaattgttctcgatctttttcattgcgattgctttttgaagttaataaatcagttttacggtgcataaaagtaggtgcagtaaagggctgcaccaaggatagcgcataaatactctttattttggaggcgaagccccaaaccgcaggcccgataaaggaagatttgtgcgatacgccattggtcaagaccatcgggtcgcgcccgtctgcatactaactttgcaacgaaaaacgatatggcgacttcaaatagaaagcggtcgcgaaaaagtcgaggcgaaacaatccgcagcggactcggaaacatgaaagacctgtccgtccaccgacacaagaccgctcccgttccggcaggtgggcgggaagaacatcaggcgagaaagtgtatcggctgtttggggttgaagcggcaagaacgatataccgtttaacaaccatatacgctgcatcgtggaaaatactatcggacgaagatccggcaaaaggcgtgtgcgacgtatcgatatcgctgtctctatccggcaagagaaatgagggaaagaagaggtaaaggaaaaatggccgaagtctgccttgaaacaaagcggagaagccgcctttgcatgagtggccgttcgatataaaaggatatggcgcagccgaaatgtataaaggggtatttccgaaggaaacggtatgagtgtctgttcggaaataaaagagggtatcgcacccgcgtatctgttttagattttagccggtgtaaccgggctgaaactggtactccagcccgtactacatttaccttttttctgttttggtctgtaattctaccggctcgtcatcccatgtcagttctttgccgagaagtttgtaaacagtccctttggggagttctatctcgattggtacattgtacacttcttccaaatactcccaatgcccacaccggccccgaacgggcttttcgggcataatccattctgttccgtctttatttactgccaaccatgccataatatcacatttttagtctgttccttagtagtaattttattcttcttgagctatcattctcttactgtattccaaaattttatccatcgtaagccactccggtttttctccctccttgaagctatcatgcagttttatcataaactcaatttgcaatttttcgtcgccagcccataaggttttggggtgtctgttaccgtaattgaggtaatactcgcagtctgaccgtaagcggtctaacagttggtatctgaaaaccgaatccctgtgtattacttcgtctaccgttactcttccatttgaatttgttacatcgtttgtcataacctataaaattttgagttttctttttccctcttgtagcacctgctactttcgggcctgatttaattatgtcgcctcgaaaggtgtcatagctctttatgcaaggtttcacgattaaatactacccgtgcgaagcggagggtggagattttgtcgtgaaccgtcaggctttgaccttgcatacaagaacggcatgacaagtacctttgcgacacaatttatatcaggcagcccgaaagcgatgtgcgaacacagggaagagaaggtctcgtgtaaaaggttgatgggcgataaaaagggtttgcagcgaaaagagaaatataaacgggtattccggggcagtataaaaattgatcgtgaggataaaagggggattgtgccagcatgtctattgcgagaaagaggaacgggctgaagctggtagttccggttcagcccgcaaagcgcattggaggtcttttgcctgttcctgtcagaaatgggctaccataatccgatgtttgaaaatcctgtttttatcgctcggtcgccgttgctttatccagatatggtgtgctccgtatccgaatatgaaatagtcgtcgagcgtggtttcgttcttcaagcgttccatacttgcccgaagttcggtttcgtcagttgcaaaaagaatcgtgttcatgattcggaaatagatttcttccgcttcatcgctatagcggcaaaagacgtgttcgattgttacgttcatggttctattggtttgattgaggtgtttcgggtacattagtcattattgattctccgtcttgattgaaaatttctattgtcgggttgccgtcgttttcttcggggagcatagattccgatgtatcggtcaatgcttgccactcttcatagcaaagacggttgtcaatgatgttcgacacgtcctcacagttccatgagcggacgattgcctcggcttcttcataactgtccgctttcacactgaaataatcccgttcccaacttgtaaccttacggtcttgataaaatttgtattctcccatatccttgttgttttaaccgcttacttctacaatatcctctattctgccgtacagtatcgagcgtaacgctgttttgtcaatcgcataatactcgtgaatacttccgtgctgtttgacgaaataccgtttgaggatgtcggaaaagtcaaagtgataaccgctcaaggcaattccacgtttgaaatagatactttcccatacgttacgggtaatccagttcttttcttcccggtttaacttgcctccgttgttcaggtgtacccgcaatttgtaaaccttgctgtcctgcaatgtcgccagttcgggaatgtcccatttgacgaattttgttgctatctgtgtcatacgtttgctatcgtttaatcatggataatcacttcatcacggtattctgaaatttccttgccgctttcaaggcggacaactatggtattgccatagtcgcccacgattgtgccttccatgtaacctttatatggattgagcaacgtgcaggacaaaccgataatatcgctatcttcttcgtattcgtacatagtgaattgtgtttaggtttaggataacttaatgttccatttaccttgcgagaatatccgaaagctcacgtattcgtcctctaactcgtatgtcagtatgcggatatagattttgtctttggctgccaataaggctattaattcgttgattgctttttccgggtattcccagcgggaatcaaattcggcatctaccgtgtcgccataccggttgacaaagccgttgaaattatcgtccagaaatgcctctatcttattgaggtcttgtttgttttccgtacttgcgtggaaaatgtttgttgcgtagtttgccataactttgaattttaagttttcttttttccctcttgtagcatccagctactttcgggcttgatttaattatgtcgcttcaaaaggtgtcatggctctttatgcaaggtttcacgattaaatactacccgtgcggaacggagggtggagattttgtcgtgaaccgttaggctttgaccttgcatacaagaaagacatgacaagtacctttgcgacacaattcatatcaggcagcccgaaagcggatgtgcgaacacagggaagagaagatctcgtgtaaaaggttgatggtttataaaaagggggttgcagcgaaaagaaaaatatgacgtggaatgtttttttcttttggctgtacaatgggaccggagtgttttacgaagttcgggaaaaggtttagtttagtccattagcctatatatatgctaaatcaaagtaaactatatttaggcagccaaatttgcctgcctataagtttttccttatctttgtatgaactaaagaatacttgcttttttcttttggctgcagtggttcttggaagctcacatgcaaccatcggacgaaaaaaatctggtgggaagctgttcaagaagtcccgattataagcaagtgcaaagaaagaaacagagtgaaaacaaaaaattgggaaatacctttaattaacgattttgtttcttgtttgttccttaattaaaatcgtgaaattttcaacaatctgattttcaaatcattatataaactatttttgagagattgaatttattatcaataattacatccaataccggaatagtcaataattgagccttaatctccttagacaattccatgcaatctattcctgagtcaaaaattcttacaaccaattcatctacataaggacgatagggctccataatatcatccgccaaacaatatgcattatagcgattatggtggtgaatacccaaagttggaagcaaaccgctacttactaatgcccgtgcaacaatggctcttaaaatggcataaccataattcaatagattattaggcggtactccccccctatcccttgtaaaattgttgattgtcggaaaaatattccgccaataatatactgcagctctcgcctccatattttcagagtctccgcttctcacatcgttcgcccaaacgtgcatgttttttactaccactccacgcatatcgcttaatactgctgcctggttacgaattttatactgtacggtttgctgccaaagttgtttttttaaaggaagagatgcttccaattgataacgaaaacgctcactttgtgttgtatttcctgataatggcaataataaccctgtgggcatatgatggctatcacatgttataatggcacaattataatctgtcaatttttcaataagccctaaggtcaaggtcaattgcatgcaatctaatacaataacaccgatatcttctataggtatcgtacgctcttttattgtactttctaccattttaatcactaattgctcattgcgtaatgaaagataagcaggattcccgaaatatagagtcttctttatcataggcaatatatttataaaatattcataatcaataaataacacacaaaaattaataacaccacgcactcattatatacttttataaatttaataaaaatattttttataacaaataatttgtcgaatagaatattcttgctatatttgagaacatttttgaagcaaatcacaataaggattattccgttgtgaaaacatttaaagcggggaattatcctcgctttcttttataacaataatccccatctgctattaaacaacaaatggggattattcgctaatactttaatttatcatcaaagaatatttcctaaacgatctattcgaatagggatacaagtatctttcaccatttctcctgataatgctcgttgattttttgattgaagactacctaatcctaattcattctgaattaattgagaaccattacaaaatttttcagctaattttttaggtaatgcataaataatattggcaacataatatggaataaaattcgctgttgtgtcgcttgaatctacaaatttataaatccgttccctatccatcggctcattaatttttccattctgcaactcctccttagttggaaggtaaaccaaatcattaggagataaaacaaatataggttcgttttcatgctcgtctttacctgcaaccggcaatccttgcttactattcataattgcctcattcaatggtattgtcctaaagcttctttttttggtataaacacccgtttctttatccaatacttccgtttcataaacagcaaaaaatagatttgtccctttggctgcttctacatatttggatgatttattgcctgtttctccaacactaaatttttcagctttttcataaaccctcacctttaatatcggctgatgctgttttccgtcatttagagcaactatatttttattcatttcctcaatcccttctggagaaaaggctacattaggatgattgccttttgcctctaagtgattcaacaatattttttgaatacccgtatcagttacttcttcccttattttatcttgagagaaacttatatccaaaggtttccttgtagcaaaatatctatcattcgtatctttggtaaaataataaatctttattttagacagattgatatcactccaaacatccttgtcaccatcaaaatattttttgatagctttcaaatcagcaccgctatttaaaagttccttcaacttcttcttcaaatccttaacaacaatgttctgaacattttttatcgctacgtttaaagacacttctttcacttttcgcaagtttacttctccaaagactgtctctttatgcattgccttgcggattgcccaactatcacccttatcttgttttagataaattttcttcccctctgaatcataatgcaggtaatgattggtagccttattgatcactcgtagattctgtttaaagctaacaataatatccttcaaggtaaaatatacatcttgcgtaaacgactcccacggctttcgtaaaagccatttataatttccagcgtcatccgtcttaatcttatcacaaagcatatttcgtaaatccaatcgcgaaacttctgcctttgcactcgcagactcattactcaaatagttaacaatattccgagatgcacaagctataattatagcatccatagcatggtgacgatgatcgatcctttttttattaaagcccttctgtagctctaaaggcattacaggaatctcataccctgaagtattgaatgcagtaaaatctgttcgccccaacaaaccgttgatacgctggaatcgtggcaagataatcttattccaaatatcgtttattccccaatcttgtttcaaccggtccgtcactccacccgtacaggaaattacatttttagatgttacctcttgctcattctcttcgcgtacaatattagacaataaaccctttactattttactaatatagcgactatcattaagttgacgtgctataaactggtctggaatatcatccagcatcaatttttttaatttagttttgttgctttgataacgttccttgacaaactcttcatattcttctagtgaaaatatttttacagtttgtccataattcaattccacaacttcacctccatgattggcaataaattcatgtgccaaaagatttgcttttaatttatttacctctgattcacatattactttattgctatatgaatcatcaaaataacgagactgaggtataatatgttctatctcataggcaggtgtaaatagctttcctaatggtataatttgccctgtatatggcgaacggtatctttgttccagccacaacttataacgcaagacttctgatttagacggacgtttttttacatcagattctaccagtttcttcattattcctgcaatatcttccggtaattctgaagtattatttaggatatcctcttcataaatgcgcaaaatttcctgctgactgggagaattaggacgtacgttctcaatctcaaattcaggatttaaaaattccgtaagcaaatacttaatgcgtaaattacgattttcattttctgatatttgctgagtgagctttactcgtttatctttcggatttttcatctcccgccccaactctatatgtatttcatctatatgtcctacttgcttccaaatatctttaacagtacgtaatgtttctgtaatcacctgttctacgataggattacgcaaagaatgctgacgaaatgatttcaaatacgaatcaatatcctcaggagagttccattttactatttcttttgcctctgcatgtctcccatacacaacataacaagccaaccacagcggcaatcctctaaaatcagatatcgattcaaaatgtttcgctttttctctaactgtatcttttattttttcatcgtactccccggttgttattttagatatcctctcttttacatcagaatttatttcattttcattccaatatttacccattcgcatcaaaggcaataattttttaatggctttagccgaataggaaccatattcttttttaaatgcaggcactttttgaaaaacatcaacgaaagcatctcccaaattatatttaacggcaaatttttgcaatccttttactaattcttctttatcttcaattgaatataacaaatgccacaatgcctgttctgtttctttattcaggaaattagcagatacactacatttgctcaatctactcaatacaatatgacgaaattcattacaaggatatactttatcttctacataattccaacggtaattttctgcatttttcttcaaattccatagcggattctttaaaaatgctttttgatctatatcttttctgtcattcaaccaatcgtataatgccgtataatcatcttcatttttcaaaaattcacttgtaacatctgtttccggtataacatctttcctatatatatgcaagtttgatataaattgccataaacgaaattcttgaaacaatggattcgacttggcaatacattttacaggaacatttgttacttgtcctgtctttacatctttggcaaaacgttcttcataagggcagttgtcaatcaaagattttttactcttcaacgggcgttggtagaataaaatatcctccaaaaacaagtatgtaaaattcttatcaagtatattattgcgatgagcttcattatgagaatataatgcatttacacaagctgtatataactccctgttttgcaattctaaatgatactcactttgttttacgagaatgcgctttaactcttctttataatatttacgttcaatcgtacgcactaacttccctttgattttttgcttcggattttccaaaagtgcatcccaaatatatgctccggttgtcttattacttgcatctatattcgattctgtgcgtttttttaccaatgtccaatcatcttctttaggcgcacgcaaggaatatttgatttcaccatctttatctcttttcggagtcccatcaggttcaagttccgtcgttacgacaaactctttcacctttccgacccaatcaagaaatacgtcactgagccttcggtatatcaaaccgttttctaaacgaacgttgtaccaagtctcttttccttttttatcaccagaatcttctacgttaacaactttcaacgcttgaaactccacagatttattggtctcctcctcttcttcttcgcttctaagctgataatatcctcgtttttgattaaaattcagcaatatccacgctagctcttctttgctgattggctctgtcaatgcttttttccgcaggtagtatatagtccaatcgtaaggtatttttccatcaccctggtccggattctgtgctttaaaaatacgtaacatttcgtcgaaagaatccttgaagatgaactcatagactccggctgcattttttcgccataccaatttaggctcatgattttttaagatctttccatatctatcaagttgctgcgcataatgtgtcggcaaaaaaccaaggatatcaaggactctgtgtaaacgatcccgacgtagcaaataacgctcgcgcaaacgacgaacaccacgtaattttgtacgttctgcagtttgtgatacagaattccctttattaaaatcgcctaatattgcagcatccatcggtattattctacttccagcagcctctataccaaccaaatgctctttcccattttcatcagtttcacttttaacaatagaccaaccaatactatttgttcctaaatcaagtccgagtatatttttcataacatatttgcattagtttgaatttttcaaagttattaaattatttcaaataacactatctttgtatcgtaattaatagcattcaaacaaaataatagaaaaaaatgtttagctacagatacccgcgtccggcggttacgacagattgtgtgattttcggctttgacggtaaacagctgcatattctattgatagaacgcagtcgggatccttacaaaggaacttgggcattgcccggcggattcttggaaatggatgaaacaacagaagaaggtgcagcccgtgagttgtatgaggagacgcacgtaaaggatgttttcctggagcaatttcatgtgttcagtgccgtgaatcgcgatcctcgggaacgagtcatcaccattgcattctatgccttgattcgtcagtgtgactatcagatattggctggcgatgatgccgcccgtgcctgctggtttgaggtggatgaattgccgcctcttgccttcgaccatgatgaaatcatcagcaaagccagagaacatttaaaaatcaagctgaaggttagctccattgcattccgactgctggatgaacagtttaccatgggcgagctgcaacgggtatatgagctaatcagcgggcgtacttacgaccgacagaatttctaccgccaagccatggtttccggcttactcgaaaacataaacgaaaaggaatcctcgccaacacggctattccgcttcaacgatcaatgctatgaagatatggaagatagcaaatcaaaacagaatccaattgatttttaagtatacacagtaaaaagtgaagtcatctatggaaaaaccagtaaaaaaaagagaaactttattgaaggaatttgccaagtgtagcgataaacttttcactttgggaatcattcgtacagacagttttaccggggaaatcggtgaattcattgcttccagatatttcaaactggatttagccgacagatcaacaaaagcgtacgacgctgtatgcagcaaaggctataaatatcagattaaatcaaaagtcacgaccgacaaccattttaactaccgtctatcaaatcttaagtatcaggattttgattttcttgtggttgtattttttgactcgcattataatacgctggctatcttaaaaatcccatccgataaaatcaattcagaacaatatcttgtcagctccgctcaaatcaatcctttttctcaagatattacaaaattaaaattatctcaaaaggaacaacatgctattggaaattttgcccaaagctatttggatttgcaaaacgcaggcattatcagaagccgtaaggttgtcggtgatatcggtgaatattatgcctgcaaacatttgaagttgcaactatgcgacaataagaacgaaaagggatttgatgcagtcaatcaaaaaggcttgacttttgagatcaagacaagacgcgtatatgaaagcggaagacgtacctctgaaacaagaaggctgaataatctttcggataagagtgccgattatctggttgttgtcactttaaatcatgcttttgaatgttctgggatgtggatcatgcccatgaaaaatgtcgttaatccgaaatcagccaatcttaaaatcgtcaatacaaccgctggagttaaaaatatagtatccagccaaatcagttggctaacgacgggtgagaaatttgtgccgttcaacgatatgaagaaacaaaaatcctccccattgtcccaaagcaataaaagagctaaaacgacaaagaaagtttcctctaaagattctcagatattagatgatgacgcgttaaaaaagattgtatctcagatgaacattgctcagaataacaacctgaaggcacaggaggatatctctattgagcaagaagagttcagttattggaggaacactccaggtacatccctttttattaaactcccaatctatattgttctgctaataatcgttttagttctgttcggatacattcttgatcaaactaaaaaaccaataactcccgaaccgtggcctaaaatcacccaggaagataatgttcccctcagagataagaacacggacaaccaattgcccgcctacccaaaaattaattttgacaacaccatcaaaattaaatcaaaaggaaaaacaattaaagtatcgccggagcaggtcttggaacagatagatatcgattatgatgacttaagggattatcttggggatgaattgcgataagatgatatacaattttccttttggatggaacgggataacctatggagtttttttatatttttgcgaaaaactaaaaaatcatggtacttataaataaccagccaaacgaaaacaatgcgttttctacaaaaatcattgaaagcggattgagcatttacgaagtgataagagtgtttgaaggacgccctatctttttgagagataatcttgtaagattagcaaattcacttattaaatcaaatattgatatcgatgtcgaaagcttgaacattcccgagaagttgcgacactttatctctctggaaaatatgacagaagggaatataaaatacgtattacactttgcttcgcagcatccggacgaatatattttcagaattccccactcctatccgactgaaatacaataccgggatggagttccaaccatgactctccaggctatgcgagaaaatccggaagtaaaatatatcaatgcagacttacgcactcagaccaaccagctgattcaggaaaatcacgtttacgaagtgctgttggtcgataaagatgggttcattacagaagggtcgcgttccaatgtgttttttatcaagggtgaaacgctttacaccagccccctgcaatatgtgttgccgggcaccagccggaaacgcgtctttgatctgtgtaaagctaatcatatccaagtgatagaagaaagaattgattgtaataaattgaatgaatacgatatagcatttatcaccggaacatctcctttaatacttccaatcaatcgtatcgacaatatccgctataatacaaacaatgatttcttacatcggcttatgaaatcttatttcgcactattggaaggttaagtaaatgatttaatgattttttagaaagatttctgcttaagaaaaaccatataaagtcatattatttatacttttgcatgattccaaaagatagagtgcaaaatgaaatatatagcggttgtttgtattataattatacttctatggagcaaaccttggcaatggctgggaacgtcaatggactccaatgttgccaaggattccagtgccttgatggtgcaaaggaggttggctgattctctgttattgctgcctgcaaaccaagtgatcaataatgaggattcggagttggaaatgacccggaaatttgatcggctgattgaaagatttatccagaaatgggaactgaaaggcgtttcttttgctttgatgaaagacgaccgactgatatacagcaaaggatatggatatgctgaccttgaaaaaggcattccgatggatgtcatgcatgtttttcgcattgcttctatctcaaagcttatcactgctgttggaatcatgaagctacaggaggaaggcaaattaaagttgtctgattgtgtattcgggccacaaggaatcctcaatgattctgttttctctgatatcaaagataaacgcagctgcaaaatcaccgtagaacatcttttacgccaccaaggcggttatacattagcctatggcgatccgatgttcaatcctctgctgattgcaaaaaaaatgaatgtacagccccctgccgatttgaatactatgatccgctacgtactttccagacgtctgcaatatactccgggcacatccagcgcttattcaaacatcggatacggaattttatcaagagttattgaaaaagcgtccggcatggactatgaaacatacatccgcaaacatattttattaccggcaggatgttttgatatgcatttaggcaaaaatctctatgaagaaaaactgcccaatgaagtgaaatattatgaagtacccaatgccgaacaaattccggcttgtgacggaagtggagaaatggcttatcgaagcaacggaggaaataatatagaagaactctatggtgctggtggttgggtagcttcgccttcagaactgcttcgctttttggcaaccatcgacaatgattcatccatccctgacattctgacatcggagtccattgaatatatgaccagtaacgttgaccacggcttgccgatcggatggattgaaacaaccaaaagaggcgactggatgcgtacaggcacattagccggaaccagcgctttgatgaaacgccaaaaagacggctattcctgggtgtttctgactaatacaagcagttggaaaggctcacgcttccccaattatattaatcgtgctgtcggtcaggcaatggctactgtcaaagaatggccggaacgcgatttgtttgaaatgcaaagcatggataatgaaaaactacttgtcaacgtccgatagtatacggtacattattttggctcccaatgcctttaagggatcactatctgccatggatttttgccaaattttgacaaaaacctttcaaacatcccctttctatacgatacaacttcccatgtttgacggaggtgacgggacagcgtcagtcatttcattttatttaaaggctgccccccacactttcgtagccgaggatgctttaaacagacctcacaagattacatattatagcaaaggtgatacggctatattcgacttggcagatgtatgcggtctgaaatttttaaaacccgaagaatacgatattttaaatgctaatactcgcggtttaggcaaagtgttgcttcatctggtagaggaaggttacaaatcgattattttgggactaggtggaagtgccagtgtggacggtggactcggagctcttgaagccatgggagcggaaattacaaaaacaagccatcaataccgcaatcctctcatcgaattggaggactttaacgctgaattattaaaagaacgtttggctgatacggaactgctgattttgtgcgacgtaaaaaacgtattgtgcggtcctgaaggggcagctcacgtctttgctccccagaaaggtgcgaacgctcaacaagtggaattgctagaaaataagatggtacaatacgccgaattattaaaaaacaaaaccggtatagacccacaacgcatcgatggtacaggcgcagccggtggtgttgctgccgctttccgaactgtactgcatgcttctctgatatctggggcggactattcattgctaatctctaattttcaccatttgcttcccggagccttttgcgttatcaccggcgaaggaaaactagacaaccaaagcctgtgcggaaagctgccgggacaaattgctgctctttgtcacaagtattccaagcctgtatatgctatatccggattggcagaacaacctctccccgattttacagaagtctgcacattggccaattatgcgccggatctgcaggaatccattgcacatccgaaagtctatttgcgacatgcagctaaagaattaaaaaagaatattgcaaaatcaatataaatttgctctttttctttgagttttgatttcaatttgcaacttttgtagtctaaattgaatacaatcaaaacacataaattatggcatttaaaattttaacaattaatcctggttcaacttctaccaaaatcgctgtatttgaggatgaaaaagaagttttcagcaaaacactgcgccactctgcagaagaattaagtccgtttcagacagttgcttcccagttccagttccgtaaagacattatcgtatctgttttgaaagctgaaggaatcgacattcactccttgtccgcaatcgttggcagaggcggtttagtgaaaccgattgaatccggtatctacgaagtgaacgaagcactggtgcgcgacctggagcaccctgtaatgggcgaacatgcatctaatttgggcggtttgattgctcaggatattgcacgtgaaatcaacaacggtgctaaagcatacattaccgacccggtagttgttgatgaattggaaccgattgctcgtatttccggtcatccggcattgaaacgtgcatctattttccacgctctgaaccagaaaatcattgcccgcacctatgcaaaagaagtagggaaaagctacgaagaactgaatctgattgttgctcacatgggtggtggtgtttctgttggagcacactgtcacggacgtgttatcgacgtgaacaacgctttggatggtgacggtcctttttctcctgaacgttcaggtggtctgccaacaggcgcattggtagaactttgctatagcggcaaatctaaagcagaagtaaagaaaatgctgaaaggcgaaggtggtgtggtagcttatttgggtacaaacgatatgcttgaagtggaaaataaagccatcgccgacccgaattctgaatatgcaatggtacagaacgccatgtgctaccagattgccaaagaaatcggagcaatggctgctgtcatgaaaggtaaagtggacgctatcctgttgactggcggtatcgcttacggaaaacctatcaccaattatatccgcgaaatggttgagttcatcgctcctgtgaaggtatatccgggcgaagacgaaatgcgcgctttagctatgaacggattgatggtattgcgtggtgaaacaactccgaaagtatactaatcaattttatttcaaagaataacagtaacgggtgcaaatctattgcacccgttatttatttgcatacagtctaattcgattttttaataaaacagcaggcttaattcaagaatttactattggagcaaaaagaagaaaatgttaattttggggactttaaaatgtgacgaaataaaacaaatggaaacaaaacattattctggtttaagtgaaactgaagtaaaggaaagcaggaaaagacatggtgaaaacatattgacacctcctccacgtactcctctttggaagctcttcctcgaaaaatttaaagaccccatcattcaaattttgcttgtcgctgcagccctatcgctggttatagccattatccataatgaatatgcagaaaccatcggtatttttgcagccatttttttggcaaccggagtcggtttctggtttgaaatggatgccaacaaaaagtttgaacttcttaatcaagtgaatgatgacattctaatcaaagtggtccgtgacggaaatatccatgaagtcgctaaaaaagatctggtagtcggtgatattgttgtattggaaacgggcgaagaagtacctgccgacggcgagttattggaagctatttccttacaagtgaatgaatcaaccctaacaggtgaacctgtaatagataaaaccactcgtccggaggaattcgatacagaagcaacttacccttccaatcgtattctgcgcggaacaacagttgtcaatggccactgtatctaccggattgacaaagttggagatgctacagaatttgggaaagtcgctgaaaaatcgactgaaatcacacacgacaaaacccctctcagcaaacaattggacggtcttgccaaattcatcagcattatcggctttgtaatagcaggcgttgtattcgtaggtctgttagccaaagacatcatggctggagttttcacagcagacaacatacttacactggatacagccggccgcatcttgcaatacttcatggtggcggttaccctgattgtcgtatctgtacccgaaggtttgccgatgagcgtaactttaagcttggcattgagcatgcgcaaaatgctgaaaactaacaatctggtccgcaaaatgcatgcatgcgaaactatgggtgcaaccactgttatctgcacagataaaaccggtacgctaactcaaaatcaaatgcaggtccaccagacgaatttttatggtctgccggaacagacgctgcgtgacaacgaaatcagtactttgatacgggaaggcatctctaccaactcaacagcctaccttgattacagccaggaagacaaagtccgctctttaggaaatccgacagaagccgccctcttgttatggttgcacagccagggagtaaattatatggactaccgtgaaaaaacggaagtgatagaacagctgactttttctaccgaacgaaaatacatggcgacaattgtacgctcatcactggacaataaagctatattatatgtcaaaggagctccggaaattgttttcagcaaatgctgccaagtaaggacaacagaaggttatgaatcagcaacttcctataagcagaccgttgacaagcaacttttggattatcagaatcaagctatgcggaccttgggattcgcctataaaatcctggaatcggaatcatttgacaaaatagaaaccattgcttctgacggtttaatattcttgggaattgctgccatttccgaccctgtgcgtcctgatgtaccggcagctgtcgccaaatgtctgaaagcaggagtcagtgttaaaatcgtcacaggtgacactcctgccacagcccgagaaatcggacgacaaataggcatctggcaagagggtgataccgatgagcaaattatcaccggagtggattttgaaaatttatccgatgaagaggcagccaaacgggttttgaaactgaaaatcatgtgccgcgcaaggcctacagacaaacagcgtttggttgaactgttgaaaaaattcggtgctgtcgttgctgttaccggcgacgggaccaatgatgctcccgccttgaatcatgcagacgtaggattatctatgggtaccggaacttctgtcgccaaggaagccagtgatatcaccttattggacgattcatttaacagcattgcgacagccgtgatgtggggacgttcgctctatcacaatatccaacgtttcattctattccaattaaccatcaatttatccgccttgttgattgtcttgattggttctatgttgggacatgaacttccgttgactgtgacacagatgctttgggttaatatgattatcgacacctttgcagccggagcattggcttccctcccgcccaatgaaaaagtaatggacgaagcccctagaaaatccaacgagtttatcatcactccaaccatgaagcgttatattctcggcatcggaatcagcttcacggctctgctgcttggcatgatgttctggtatacacataccggaggtgtcatcacccgacacgaattgtcaatattcttcactacctttgtgatgctgcaattctggaatatgtttaatgccaaagctttcttagctcatggctctgccttcaagggactgaaagattgcaccggattcttaattgtcatgctgattatccctatcggacaatacttgattgttcaatttggcggagatgttttccggaccgaacctctctctttaaaagaatgggccgctattatcggctccacctccatggtattatggattggagaactactcagattattcaaaaaacaataaaaaattcgcccggctttcaaaaaaagaccgggcgaaaaaaataatagatgactggtttacgaagctttagctaccgactttaattgcaacttctcatcctgttgtgcttgcatatattgatatatttcccaatgtccgtccggatactccatcaatgcgcttaacgactccacccaatcccctgaattcaggtaatgcacatcgccataatgcacatccgcatattgatgtatatgtccgcatataataccatcgtaatgccggttggccgccaaagaggacaattctttttcaaaatccgaaatatatgaaacggcagatttcaccttgtgcttgattgactgtgaaaatgaataatactccttgccgctttttttccgccgatcatttaaccatttattcagccacaataaaaatgtataaccataatcgcccagttttgccaaccaacgcatatgagtcgttatattgtcgaatatatctccatgagtcacataatatcgtttaccatgagtattatggacataatctcctacaatatttatgttcaacagattcaacggaaccagcttatccaggaaatcatcatgattgccgcgcacataaataacttcagtcccataattttccatcattttcatgataacttttatcaggtctgtataagattgcttccagcggccaaaaggattccgctgcaacttccagccatcaatgatatcaccgtttaaaatcaatttgtcgcaatctacacttttgaggaaaactgtcagttcctccacttttgaatgctcagaacctaggtgtacgtctgaaatcacgacagttgccaattttaatctttgaaccatactttttcacttttaactatgcaaaataactgatatgatatgacgcaattattgagaaaaacaaacataattgttacatctattactatctttgtagataacaacaactatgtaatgaaatgacaaaaaaaatacgtacagcgctttataatgtgctccctggcgaaaaagcgcacagattgatggctccacggccaaaattcatcgaaggaattgaaggcatccatacaacccctcctataaagagtgcggtgcttgtgttggttgtcccttatgaaaatgaattggcaatacctttcatccgaaggacaaaggccggtaaataccatggaggacaaatagccctgcctggtgggaaaatggagaaagaagacaaaaatgccctgcagactgctttacgggaatgccacgaagaaatcggtgttccggaaaattccgtttccatcttaggcattttaagtgatatctatatcccgctaagtaatttcaatatcacccctattgtcggtacaacactaaaactgccggaatttgtgctttcggtaaatgaagtggaaaaggtgcttctaatcaagttgtcagaactttttaatgacgccaataaaaccacccacacgtttacacgtcatgaccatcccattgttgctcccggatataaaatcggagacaatttcatttggggagcaaccgcaatgattatcgcagaacttgaacaattaatgaaaaccaataccttcagcaaattatgatttgcgacaaataaaatattgcgggtgataagtcaaaggataacgtccgtccttcagaaagtgcacagcatattcttgtgcaaaagcatccaagctagcccgtgtccatgtcttatgggaagacatggcattaactcccgttttcttgatatgctgcaaaatatccaacggataattaaaatccaatgtatacagttcctcttctgtatgcactacctcaaaatagccggacaatatttcttctgtttcagccaaagaatgataggtcaagccattgcctgtaattgctttcagttcccggcaattgtctttcccaaaactgctgaaaaccaaataacctccgggaacaatatgtcgcgccaaatgtccgaaagtttctgacggatgctccagccactgaaatgtagaagtagagactaccaacgaaaacattccggcaagcggtaatttttctatatcgccgggcagacaatatcgtgcctcaataccgcatctacctgcagctttaatacacattgcatccaccaaatcatttaaccacaattctttgtaattccacagacacttgagttgttcagtcaataatccggtaccacaacctacctccaaaatccggttctgctctaccggacaataacatttcagcaactccaccaaatgcatcacaatctttttctgaacatgagcattctcttcataactgtccacacttcttctgaacctacattctatttccgccttttctacgctcatagttccaaaatttgatcccaactttcaaaatgataaaacggataatgtcccccatcaagttttactatctttttagcccgattatcccaccaagctaactggttagttgaagaaaagataatatcgccggatgatatatacaccttatcccatatcaatgaatactgcctggtttctgcctgcaaacgaatcgccaccaattcgtcgcacacctcttccacctctctttgaggtctgttgtctacaaaacgttccctttctgctgcattgtcaagcatgcgcagcataaacttttcacgtccagctgcattcattcctctttctgtcaaacgatatatcttctccggtattccccacaaatcgtttacgggatgctctgtgccattcaatgctatcaacctttcgtaggaaattccccaatccataagcgtattggctgcagcccatacccccatagaccaagcgacaacatagatctcttgataagataccaattccggaagattttcaatatccaattgccgataatcatttatcaccaagatatcgtaatccccctttatatgttgcaccgcttttccgtccataccccatccgttgaaaaaaacgatgacccgaccagtgttttttttatccaaccactctattcgcatatattctctttactccagacattccaaaaattcaaacagacactcataatcttccatcggaattgatgcattcagggaaaaacggatacgggcttcatttttaggaacagtcggatacctcaccggcaaagcaaagaaaccgttttcctgcaataaattggccatttcaatactgttttcattagaaccgcacaccatcggtacaatatgagaatttcctctggtttcaaatcctttttcgtttaaaacacttttcagacgctcggacaccttggctaattttaaacgtaaatcataaaaatcaggcatccggttcaagataaaacgtgtccaggcaacatttaccggtggtaatgccgtcgtgaaaatcaaactacgctgtgtattaatcaaatactcccggaacatctgctcgcataccacaaaagcccccatggatgcaaatgccttcccaaaggtacctacaataaagtctatttcttctgtacatgcctgttcttcacaacagcctaaaccattcgttccacgcacccctatcgcatgtgcttcatcgacatacaggaaagcatcgaattctttcttgatttcacacaactgctgcaaatcagcgacatcaccgtccatactgaaaatagattcagtcacaataaatacattttcatattcctcccgatggtgcagcaacaaattccgcaaatggtcgtaatccaaatgccgatagcgcaacatttgtgcatcactcaaacgcagaccgtctataatactggcatgcactaatttatcagcaacaatcaaatcatacttgccagccaaagccggcaatattccaatattggcatgataaccagaattaaatactaaagcagcttccttgtcgtatatatctgccaaatcatcttcgagcatcttgtaatattggtgattaccggataacaagcgtgatgaggcggcactatatgccaatgccattacgtctgtttcagctctgaattcatccaataaacgaggattgctggacaaacctaaataatcgttggaagaaaggttcagcatctccttaccatctgcatggatcaaaaaaccattgtgttcaatctccctcaatatcctataattaccagactcttttataatatctaactttctggtatatcgttctttattcatcatcactttatatattacttacaatcttcagcaatccggctgtcaatttactcaattctgccggctttattacaaacggaggcatgatataaaccaattttccaaacggacgaacccagataccctcttctacaaattgagcctgtagaaccgccatattgaccggttctttcatttcaagcactccaatcgcacccaacacccggacatccgcaacttgtttcatctgcgctgccggagccaattctctacgtaattgctgttctataccctgaatcataacttctaaatcataactcctcaacaaatcgatggaagcacaagcaacggcacatgccaaaggattgcccataaaggtaggaccatgcataaagacaaacggatctcgtgaacaaatcatcgtcgctacagcttcggtcgccatggtcgctgcaaaactcatatatccacctgtgattgccttaccgatacacatgatgtccggagtaatgccggcataatccacagcccacaatttaccggtgcgtccgaaaccggtagcaatctcatcacaaatcaacaacacctcatactcatgacacaagcgtctgacttctttcagataatccgcagaataaaaccacattccgccggctccctgcacaataggttcgagaatcactgctgccatatcggcatgatgggcttcaaaacaagctcgtagctctttaaaatcctcttcgttacacgtttcaccaaaacgacgttccggacggttgataaaatactgtatcggcagacagccatgaaaaataccatgcatgccggtcacaggatcgcaaacagacatggcattccaagtatcgccatggtaacctttggttattgtcataaaatgctttttctcttctctgccggcagcataccaatactgcatcgccattttcatggcaacctccaccgaaacagaacctgaatcagagaaaaatatcttatccattcctttaggagctatagacaatactttttctgccaactctacagccggccgatgagtaaatccaccgaacatcacatgcgacatgttctctatctgctttctcagggcttcattcaataccggattattatatccatgaatctcacaccaccaggatgacataccgtcaatcaaccgtctgccatcttccagttcgatataaacaccttcagcccgtttcaccggaaacacaggaagcggatcaattgtagatgtatagggatgccagatatgttccctgtcatattttaataattcctctgtattcataatgctcaacttaaattgtaaatcccagttctttaacttttttcatatcctccatgactttagaaccgacggttgtcaataaatcgccgacaatagcagcattgatacccgcagcaatggcttctgtctcaatgtgggctatcaacattctcccccccgcaaaacgcaaataagcatccggatggataaaacggaaaatggctattgtagtcaaaacctcttcatcttgcaacggagcagcatgctccaaaggagtgcccggaattggattcagtacattaatcgggatagacttaacacccaaatcacggatggtcaatgccaggtcaatacgatcttccatggtttctcccatcccaataataccgccggaacagacttccataccgatttcctgcgcagcacggattgtagcaatcttttcatccatggtatgggtagaacacaactctccgaaataacggggtgaagtctcaagattacagtgatacctcctgatgcctgcatccatcaatttctgcaactgctccttttttaacaaccccatggaggcgcaaagattcagtgctgaatgtttgccgatttttacagcataatcacaaagacgctcaatattacgatcggacaaagctctgccactcgtgacaaacgaaaacttgtcaactccgtatttattgttcaaatcagccatttgcatacaagtctcttcatccaccaattcgtattcttccacattggttttgaacacagccgactgcgcacaccatttacagttttcagaacatcgtcccgaacgggcatttataatagaacacgtatcaaaatgtcgaccgaccattttatcgcggatttcacctgctgctgtatacaaagcctgcttgtcctgtgttttgctcaattgcaaagcctcttcgcgcgttatttgcccgcccgacaatactttttcctttaaactttcaatcatatctatccgtctttattataaaaaagaggatataccactttgccgatatatcctcttttaacttatacacttcccatcgcaacaggacacaattcgcccttgttacgagcgtttatctgacattctttcactgtctcggcaatccttggaacaacctccgacactctatccaggttcacaatcaccccattccggctagcctttaacagtacatttttatacatatggagagccaggcgagcaattttcacctcttgtcccaaaccggcaaaaacagcataccctttcttactccaacaagaaaagtgcaggtaacgttttgtaaatgccaggcggtgcgtcatatgtatcgtttattatcgttgccaaaattacgaaaattattcaaacaaagccactccaaagcgaaaatcaatgtttttgtttcatctgctgccatttttcacgtgccagcacttgcatatctgcaacagaatccttttcatccacaatctcaaaacccaaaatagtctcaataacatcttccatcgtcactatcccccgcatacatccatattcatcaatgacaatagaaatatgctccttcttctccagcaacttttcccaaatagtagacacagagtcattctcgttaaagaaaagcactggacgcaccactcccgacaatttatcttcaaacttatcttctgccaacttctccagaatcgtctgacgcaaaacataaccggtaatataatcttccttctcgccatacaccgggatacgagaataagtacgatattgttgctctttataaaaatccttcaacgtcatcccttcccaagccgcagaaaccactacactcggtgtcatgatttcacgtactgtcacctgattcagtttaatcatattttgaatcatcttattctcttgcatctcaaagacaccttcttctgtaccgacagtaaccatggctgatacctcctcacggctcactgacatcacttgatttttaggagaaataacccgagttatcaattccgacaataaaaccagcggataagtaacaacaatcaacatcctgataatccgagccgaagggatcgccagagtacgccaataacaggctccaaccgttttcgggatgatttccgacaacactaaaatcaatatcgtcaatatggctgatatgattccaaaataggcctctccaaacaccttgaccgcttcagctcccactccggcagcacctaccgtatgagcgatggtatttaacgaaagaattgccgaaataggcttgtcgatatcctgtttcagttttttcagcaaaccggcagatttaacaccggctttttccttcatagaaataaaagacatcggtgtggacaacaaaacagcttctaaaacagaacataaaaatgaaagtgcaagtgcaagaactaaatataatattacaaaaaacatagctttaattaaaaataaacaatacagacagccggaagccgtccaaaaatcatctcataaaaacaaatacaagatcattgctataaacggtatatgcaccaaaaagaacgtttcgtaaaaaacaaattcttcaaaatctgtgcatcctcattcaactcttcgtgcaacaaagagcattcattaaagctaataataaaaggtgattctaatttacgtacccgttgaaccgaaggtattctctgtaaagtaccgtctttttcaagacagaattctcctgcagccacaacgtcctgcatctccatacctccggggacagcaccggccaacggctcaatacgaacttccttccctcctgcctcgactatgaaaaatacagcaagaagaaaaaacagccgcccgataaatgctatccaacccatcagatatatcctgtttaattcataaagcaaacactcttttattttgccacaaaaatagaaaatctttaaaaagatgcacataccggaataaaattttattcaaacttctcatatttcaataaaatagcctagttttgcacttatcattagactctacacacaaagcataaaaatcaaaatatcaacaaatgaaaaaggctattgtattattatcaggagggttggattcaaccaccgcactttatttagcaaaaagtcaaggatttgacgaattatatgccatcacttttctatatggccaaaaacatgataaagaactaaaaagcgcacaggcagtagccaaagccgtaggtgtcaaagaacacaaaattgtaaatctccttctaaaccaatggcacggatgctcattgacagatccggatatagatgtaaaagacggaaatgcagaacgccaggacattcccgacacctacgtacctgcccgcaacatggtatttctgtcggttgccgcttcctgggcagatgctttggacatcacggatatttttatcggagtcagcgaagttgattactccggttacgtggattgcagggaagaattcatcaaagcgatggaacaggctgtcaatttaggaacagtattaggtgccgagaaaaaacagcatatcacaatacatgccccttttatgcacatgacaaaagccgacgaagtgaaattaggagaacagctaggtgtagatttcggtcttacctggacatgctatcgtggcggagacaagccatgcggcacttgcgacagctgtctgcttagagcaaaagcatttgcagaagcaggcgtagaagacccgttaacccgataaagacacaaaaacagaaatttatgataatcagaaaactattcaaattcgaaggtgctcatatcgtccgcaattgttcatcagaaaaatgcagagaaaacattcacggacattcatatattgttgaagtgttcatcacatcagacaaattagacgatggatacatgatcatggatttttgccgattgaaaaaagtcaaagattttatcgaaagcttcgaccacacctacacattatggaacaaagacaatgaagatttcaaagccttcatctacaaatacaacaaacgcgtagcagagattcccgtctctccgtcagccgaaggatttgcactgatgttcttctatgccattgacaaaattctaaatgaaatgccggcagtcaacggcgaaggaaatgtacggctacactccgtccgggtgcacgaaacagcaacgggctatgcagaggctttccgcgaagatttggcattggtccgtttcactatggacgacttccatttcagtttttcaaacaactaaccgcaaggatatgcttttagccaaagacggtatttttcccatcaccaaagaccaatacggacagtctcttacagaaagtcctgcctcaggctttacatttcccggaaccattcagggcgaaggcaaattatgtggcataccctcactcttcatccgcctggccggttgcaacctgcattgccgttggcaaatggaagatggcagtttctccccatgcgacacaacgtatgcagcctatgaggtgaaaggtgcatatccaatggatactgaagacatttataaaacaatattgcaaaatagcgatgccatcaaccatattgtcgtaacaggaggagaacctctacttcaagcaaaggaactaaaaacactgtgctacaaattaaagcaggacaacaaattccatatcaccttggaaacgaatgctacgatatttgatgaatatatagccaactatattgatcttttcagcatgtcacccaaattggcaagctcccaaggctcccaatctgctgtttcggtggaaataatacaagcctatgtcagctatgcacaagaacatcataaagattttcagctgaaattcgtctactcatgcgaaaaggatatcgaagaaattgaaaagattctttcgcatatccggggatggcatccggaagatattctgcttatgccacttggagggacggtcgacacaatgcgaagaaacatggtttcaacactaaaacattgcattcggaatggatggagatactgtgacagacttcacctatcgttatttggagaaaaagcaggcgtctaaactcattcatttcaacgtttcaatgccaagactgtaggcgttttataaacgatttttccatcttcaagcaatactctgataccttcaagaacatactccctcttgaccggtatcagatgcaccaatgcatttatctccctgtcagactcttgcaaataagtaagaatcatccggtacacctgtcgcctgtcaacccgcccgacagattttttctgttccagacagtaatcacatacaccacaggaaattgcttccttttgaccaaagtaatccatcaaataaagctgcctacatttttcattttcttgtatatacccgatcatcttctctaccttggcagcatacgacagctttctgtctgcataggcttctcttccgatatgtaaataagactccggcacccgaggctggtgataaacgatataaggccggtcattacccgggatataactgacaatcttacgacgggcaagtcccagcagtgcctgataaatatcctcccgcgtcactcccaaccgctcggcaatccactcttcctcaataaacgcatattgcacaaatatcccggagtaagtgcggagcagtaactcaaccaatccttcattcaaagaagtctgcaagtccaccttatacaactggtcgcgcaacactaaaaagctgatacgggaacaagaatgcacctccgtggtacactccagataacctgccacctgcaacacgccgatagcagccagcgtctgaacatactccaatttataggtcttgacaaataaatccggattgaactcaaaggcaaaaccaccgcctgccccctcctccaactgaaagaaattgccgagcaaacggtacacctcccgaataaatttgacatcaggaaaattcttatccaccctcttctttaaagccgtaagcgtagcctcattataaagcaaaacggcatacgcccgtttgccatcacgaccggcacggccggcttcctgaaaataagcttcgggactatccggaatatcaaaatgaacgacaagccgtacatccggtttgtcaatacccataccaaacgcattcgtcgccacgattacaggagtttcgcctcgtttccacacttcctgctttacactacgctgcaacgatgacaagcctgcatggtaataatcggcatgtatgccttttttgccaaggaaatcagccaactcctctgccgttgcccgcttccgcacataaacaatcgccccgccttgcaccgatgccaaaatatgcaacaactcacctaatttatcattcgccttacggactacataagagatattctcacgccggaaacttttggaaagcacatgaggctctgcaaacttcaactgcctctgaatatcttctgccacctgaggcgttgccgtagccgtcaaagccaacaccgccacctgagggaaaagagagcgaatttcagcaatccgaagataagagggtctgaaatcatatccccattgcgaaatacagtgcgcttcatcaacggccagcagcgaaagatgcatccgcttcaggtattctctgaaacgttcggaagccagtcgctcgggagatacatacaaaaatttaatccgatcggccaaggctttattcaaaacagatttcacctcctccgcctgccgtcctgtataaacagcctctgcttcaatgcctcttttcttcaactcctcgacctggtctttcatcaaagcaatcaaaggagtcaccaccatacaaatcccctccaataccatgccgggcacctggtaagtgatagacttgccaccacccgtcggcatcaaagcaagcgtatccctccccgacagaaccgaacggataatgtcttcctgcaaaggacggaactcatcatatccccaatattgttttaaaatccggtgaatatccatgatttttatctactgaaaattatctccgcagcaaagatacaaaggaattgaattttgaaattgaaatttgaaaattatttactactttcgcccggatataacaagtatgaataggatgagacatataatcgcttttacggtaatcttcacattgttttcgtgccagcgggaacaaccccaagagcagcctgtcgtacaggtatttgaaagtatgctgtatccttcagaattatcagagtttgttcctaaagggacttcacccgaagacagcgtcatctttgctcaaaattttgtccgcaactgggtgacacaaaaacttctcttgcacaaagccattgaaaacctgtcattcgaacagcacaagatacagaagcaagtggaagaataccgcacctccctgttgattcatgaatacaagcgcaaactgatagaacaacgtctcaaagacgatataaacgaaattgaaatagaggaatattaccagaaaaacgaacagaactttgtattatccacccccatcgccaaggttgtattctgcatcatccccaaaaatgctcccaaccagaagcaattgaggaaatggttcctctcggacaaagaagaagaccaggacaaactggaagactattgcctgagcaatgccaaaaaatacgaccgtttcaacgaccgctggatagaagcaaaattcctgctgaatctcattcccggagacccccaggcattgtccaacgaaatattcacacgcaagaatatagaaaaggaagacgaaaacaatttctactatttgaaaatcaaagaattaaaaaaagaacaaaccatagcaccccttgattacgtgagagatgaaattgtattgattctaaaaaataaaaagaaattacagtttgaacatgaattagaaaaacagattaataaagaagggcgacagaaaaagtatgtaaaatttcactaaatacatgcagattcaacgcctgttaaacaaaaatattatagcttagaagcctcaaatgaaagtctaatacagcaaattataacaaatagtatatgaaaaagtatttattattgcttattttatgcgtccaggccggttttctgacggcacaaaaaaatgttgtggacaaaatcgtagccatcgtgggtgaagagattatcctgaaatcggatatagaaaatgcctatctgcaagaacaagggcaaggccttgtatcttcctcttccgactacaagaccgagcttttggaaaaacaactgattcaaaaactgcttttggcacaggcacagatagacagtatatcggtgacagaagaacaagttgaaaacgctgttgccaaccgcattgagtattttatcagcaacatcggctcacaggaacgtcttgaggcctatttcggtaaatcactggaagaaatcaaagacgatatgcgcggaccgctacgcgaattgctgataacggaacagatgcaacaaaaaatcgtagagaagatacgcatcaccccttcggaggtaagaagttatttcaaacggttgcccaaagacagcctgccggaaatgccggaccgctacgaattgcagcaaatcgtgcttcgtccccgcatcagtgacgcagagaaagagcgcatacgtgaacgtctgcgcgaataccgcgaacagattctgaaaggcgaaaaaacattcaacacgcttgccgtgctctattcggaagaccccggttcagccacccgtggcggagaattaggctatattccccgcaatcaactggatcctgcttttgccgaagcagcattcaacttgaaacccggcaaaatctcaaagattgtcgaatcggaattcggtttccacatcatccagcttatcgaccgtcagggagaaaaaatcaatgtacggcacattcttctgcaacctaaaatcgcagaagaagaaaaagaagaggcgctactccgtctagataccatccgtcaatatatcaatgaaaacaagatgacatttgaagaagccgccatgtatttctcttcagacaagcagactcgcaacaacggaggtctggtggcagacccacaaaccagtgaatcccgcatcgcacgcgccaacattcccggagagatggcaaaagaaatcaacagcctgaaagtgggcgaagtatccatgccttttgtcacacattcggaaagaggtcaggaagaatacaaaatcgtaaaagtaaaggaattctacccacgccaccgtgccaaccttgaagacgactggcaaaacttcgaactgatgctgaccaatgagaagcagatggacaaactggaaaaatgggttaaagaaaaacaggcaaacacctatatccatatcgatgaagaataccggaaaggcaaattcagatatgatggttggataaaataaaagagctgatagatagaacatgtttaaatcaatgacagccaaagcagtttgtctgcttatgtgtatatgcggttttctccagatggcttccggtcaggagaaaacccaaatcaatattataagtaccgactcgcttgccgttgccaaatatgcaaaagatcccaaccggtttatcggcaatgtcaagctcacacacaaagacatggtcatgacttgcgacagtctgtaccaatatgccgacagcaactatatcgaagctttcgggcgtgtacatgccgtgcaaaacgacaccctgaatctttggggtgattttctgtattactacgggaacaccggcaaagcaaaagtccgcaagaatgtcgtcatgcagaatccgacgcttacgcttaccaccgattcgctcaactatgacatggaaacccgtgtcggacactatttcaacggcggtacaatcaaagatagcgtcaacacgcttatcagtgacatcggctactattttgtacggatgaacgaactgtttttcaaagacagcgtcaaggtgtacacctcgcaatacgacctgttctccgacacgttgaaataccgaaccgacagcaaactgattaccattctgggccccacccacattgtaggagaaaacaggacgttatattcagaaaacggctggtataattcccttacctcccatgcagaactatacaaaaacaatatcctaaactataacacttacaccggcagttcggacaccattgtcgtagacagcgtttccggcacagccatcatgcgacagcatatacatttgtatgacacagtcaacaaagtgatagtcgaaggcaattacggcgaggtccttaaaaataatgattatgcttttgtaacggatagagcgttgttaatattggtcggccagtcggattcattgtttgtacacggcgacaccctatccatcaacaaggattcagcaggctataatgtaatgaaagcctatcatcataccaaattttacagcatggatctacagggagtctgcgactcgatggtattcccgacagcagattcgaccgtatatctatacaaagaacctgttgtatgggcaagcggcaaccaattgacagcaacagaaatcagtatgcacatgaaagacaatcaagtggatatctttgacatgaaaaacaaagccatgattgtcaatccggtagattcaacgatgtacaaactactccccgaccaacgcggagtcttgttcaaccaaatcaaaggacgagatatgcgtggctatgtcaaaaacaacgagctttacctcatgatggtaaacggcagcggagaatccatcttctaccccgacgacaaaggattcatcatcggtctgaacaaagccatgagctcgactatcaaaatagagcttgaaaataaaaaaataaaggacatcacctttatcacaaaagttgaagggaccttgaatccgctactcctggtgaaaccggaagacagagaacttaaagatttccactggcacattgataaaaaaccactaaagaaagaggatatattccactaaaaccgcatggcgcaatgagaaatttcactcgttgcgctttctttttgcccgtttctctccttcttccctcccactcaaatatatgacacctatatatcaaagataacacaactataagtcaaagataacaagttgttatctttgacttatagttaccctatatttaagttggaaatgtatgggatttgaacaggagagaaacgggataaatatcagcccaaaagtacatcagaccttaatattttaacacttgttaacagggggggaaattaaataatttgtatattgcgaccggaaggaacaaataaccgaccggctattttatgaatattaatcttaccgattatgaaaaatacatttgactttatcccctccgcagaggaagccagacggcagcccgtccgcagggaaatctatgaacaaagtgtagatctatacaatgaagggaagcatctggaggcatttcactgccttttggactatctgaatgatggattccgcaccagattcggaaacgatagcggaaccgagtttcatatcccccatggttctattgtggtagacatccgcattcacgacggaatcatgcacatcgaggcagacttcctgaacctgcccgaaaaaggacgtgtcgccatgctccgacaggtggcagacctgaacatcaacaaactgttgctggcgggtttcataaaagaaggagaccggttgaaaatgcgctatgtgacaccgcttaatcaaagccatcctcacaaaatatacggagtgctccagaatatctgttatgtaggcgaccgtttcgatgatgaattctgtacccaattcggagctacccgctgttataaaccgcaggtgacaccttatccggcagagacagcagatcaagtgtatgaaggaatccaatctttgggtagggctgcactgaatgccttgaacgaatataattctgcacggcactacggttactcctggaatgtgcttgacaccaccttctaccagatagcctattttgccaatccgcagggacagttcagcaacaaccttgaaaaagcaatcgatgatatggatgccgaacgtccggtagaagaacttgtatccaaagggatggactatctcaaaaaactacttgccaccccaaaagaagcactggctgaagacttgtattttgcagacaagctggtttcaaaccgccgaagcgcatcactccagaccatacaggaaattttcaaagatgtatatgaagaagcaaccgaagctgtccagtcgggagatttcgaacgagcagctgtacggatgctctacatcatctatgaaacctactactataacgacatacccgaagaaatcagcttgatgctgacccatgcactgaaggcatccggaggacaacccttggaacaggcagcccgcacgctctatgaaaccctggacaacatcatggagggagacctttccggcagtgcactctattcctgtgccgacaatccgatagccggccggatgatggagcaggcagtcggtgccgcccaagccatgcaacaaaagataacagaaaaaatgagcggaagcgatattgtcgaattacaacagaaaatggtggaagccatgacgcgtggcgacatggcggaatatacccggcttgccggagagcttcagcaaaagatgatgaacggtctatttaattaatccccataaattgaaacggaaatggaacaaaacatatataaatcggttttcaaagtgacacatgcagaaggttcaggcagttgcttttatctgaaatcacacaacctttttgtaaccaattaccatgtcgtggaaggttttcatgccgtagccatccacgacagcaaccgcaatccctatccggctaaagtcgtattggtcaatgtgtcactggatatcgcattgctatccgtatcccacgacttttcagaccttccggacattaatctgtcggaagacgataccttgggtataggaggaaaaatccgtgtagccggttatccttacggaatgccgttcactgtgacagaaggaaccgtatcagcccccaaacaactgatgaacggacaatattacatacagacagatgcggcagtcaatcccggcaattccggaggtcccatcctgaacgacaaagacgaaatcgtcggtatcacagttgccaaaataaacgatgcggacaacatgggattcggaatccgggtggaaaacctacgtaaagtacttgaaagtgtagacgaactggatcgggacacattcaacgttcaatgtgagagttgtgacgaactaatctcaactccggatggctattgcccatcctgtggagaaaaattgccggaagacatatttgaagaacgacatgtttctccgctcacggaattctgtgaaagtgccattgagcagatgggaatcaacccgatacttgcccgtgacggttatgaagcatggtgttttcacaaaggcagttcggaaatacgcatattcgtctataacagagcctatctgtttatggtgtcacctgtaaatcttctgcctaagaaagaagttgaaagagtgctggaatatatgctttcaaccgactttaccccctacaaaatgggcatagacggcaggcagatttacctgatgtaccgcatccatctatcagatatcacagatgaatacgaagactccatccgagaaaacatggtcaaccttgcaagcaaagcagatgaaacggacaatatgctggtcgaacaattcggctgcgaattttcggcatacagcaaacaagagcaacaggcgtaaccgataaatacacttgtctggctgtgtctccatgtggaggcacagccaatatccgcatttacaaccagtcctatggaaatatatcatgcgaaacccaagatcaaactttctccggtagtaaaaaacgggaaagaatttgtcgaagtgactttcggtaatgacaatgacatccgcttgtcgctgtcgaaggaagaaagggtatatacctcctatttccgcgatttccaacagcatttcaaggggcgtaagattgaaacggtcacccccggcgacatcaacgaatcccgctccctgatacgggtgcgtcaaggaaagggcaagaaggaccgctacaccctgctgtcaaaaccgttgatgaaaaagctgacggaatataacagactatacaaaccgaaagtgtggctttttgaacacagaccaggcgaacctttcaccgagagtatcgtgtcgaaatggctaaaggcagcggcccgggaagcgggaatcacaaaacggatttatccgcacctgctgcgccattcgtttgccacccacttgctggaacaaggcaccgacatcaagattgtgaaagagcttatgggacataacaacatcaagacaacggaaaggtatgtccacatagccgacactttcaaaagcaatgtcaaaagcccgttggacgacctgttgatggaggaaaacgaggtctgatacttaaagaaaataacagccaaatcggctgatagtataacattagcggtaaatccaagaattaaaggtatggagatatatgatataaacacaatttacagtaagtataaggaatttatcgattctaactgtacagatttgaaagatgaagtagaaatgatagttagacggagagggctatcttctataatgaatgattccaagtggttaaaattacaaaccgctattctgtctattccgaaatttgaacccatatatggtgttcaacttttgactgatgagattgaacattctcccgtatttgaagtaccgacgcttccgatttatggagattgggaacttatatatgaaaattgggaatacgccccgccaccattctttaatattgaatggatggcaatacagcctttgaataaaattcacaaaggaagattaataaatcccgaaatcatagataaatcaaatatattggtagaaattcttcataagtatcatataccatttgagaaggaagatgaacatacgtttgtaatctacgggtataaatgatgaataaaccgataacaaacagcaaaccgactgaacaagcggaacgctgccaaacattagcggtaaatccaagaattaaaggtatggagatatatgatataaacacaatttacagtaagtataaggaatttatcgattctaactgtacagatttgaaagatgaagtagaaatgatagttagacggagagggctatcttctataatgaatgattccaagtggttaaaattacaaaccgctattctgtctattccgaaatttgaacccatatatggtgttcaacttttgactgatgagattgaacattctcccgtatttgaagtaccgacgcttccgatttatggagattgggaacttatatatgaaaattgggaatacgccccgccaccattctttaatattgaatggatggcaatacagcctttgaataaaattcacaaaggaagattaataaatcccgaaatcatagataaatcaaatatattggtagaaattcttcataagtatcatataccatttgagaaggaagatgaacatacgtttgtaatctacgggtataaatgatgaataaaccgataacaaacagcaaaccgactgaacaagcggaacgctgccaaacattatctacttaataataagcattaaaactatgagattcttaaaaattatgggaatatttacttctatcataagtttattgagttgcgggcatgggaataaacgagtgacacaaaacgacagtataacccccaatattccggttgctgcccgaattacgatagacaaactgccggatgtattgagaaacgtgcaggcaggaaaaacagattatgattttataggtatttgttccaatggtgtggactgcatctattttgtactggagaacggaaagttctacattgactttgaagccataagcaaggaacagcttccttatctggattcactgaaacagtttgccaaaggacataattatcctattattgaaacaacctataacaatactccggtagattacaaccatctgaaatacgctcccgtgcttagcctgaaagtctatgcggacatagacagtatcgtgaaggtcggaagccagattgaacagaccattttcaagaatagcgaccaaaccgtttacgaaatagtgccttgatatggataatgtgtcggagaaaatagacaaatggctgggcgaacatccggactatgccttcctgatattcatcggggtatttctgttcgtacttttgggtattatactcaactggaaatgggcttgggaaccccctacttccagcggttgggaactggtaaacacgctcggagaaaggacataccgcttctggaaaggtgtgtttatggtcattttaatcaccattttagtgattatatattgcacaacttattaaattacatgagaggacagtcatctaaaaaacggaaatactactttttcgactatctgttctggttgggagaaatggcacagtggcattacaagggcgagccaagacgccctgacggggaatccatgctgatgctttacatcatgatatttatctatgagccgatattctttacaaccgctcatttcctttacggctcttcagtattcgagtggcttacagttgccatgatagtcggaagcattgcaatcatccactgtatatcgcgcggttggatatacccgttttcacgaagggaagcggtcatgcagcactatgaggaccgcaggttcagccccttcagatgttacttcttcgtgttctccctcggctttctgattattgccgaagcgtacctgttgccaagcacactgatgcggatagacgggcacaaggcggagccggcggagaacacacggacggaagttccgcaaaggtggagggattaccttgcactgcatatcacggtaggagcccgtcaggaagtacccagcgaagccttgcaatatctgatcaatcaggatggtcgcacattccactacgggcaaccggtttatgtcatgcaggtaaggaaggaagatatgggcggagagttccgtgcaggattgctgaaccatgctacttttgatgaaatccaagacgacagacggaagtttgtcgaatgcacatgggtcaagggatatacgccggacagcataagagtactactgaccgggtggtatgaggtgagaaacgccgaactttgtccggtggactctttggaatggacggaagaaatgaaatgaagaaatctatcatagtattgtttttagcagctgtatctgttgtgagttgcgagccgcccatgttcctatattagtttaggatatagataaaaaaacccggattcatcaccagtaactgaaagctgggagaggaacgcccgggactgcattacaaaaacacatataatatggaacattgccaagaatgttcctacttgactctaataaagggataggtgtgtcgattattcttcaaaatagacagaataacgattccagaaatcttcgttttccttgatatcttcgtaataagtacgcccttctattacgtccggagtttcaattttcacccgagttgtcacatattccatttgtccactgacagctttgccttcttctgtgtatttgtaatcaacatttacaccactcaagaaataaacggattttaattttttgtaagttgtggttatctgcatagtgacatcactctttggcttttcattgataacaaccaagttgcgtcccaatgaattgaagtcgcgagatgtaatgtttactacattcttcaatacagcaaaatctttcagatttacatatatctcgccagaatagctctgcacggtcggatcgccggcagttgaaatagaaggcttggtagccgtatagctgataatctggactgaatccccctcgtaaattattttgcctttacttttcagcttataatcacgcgcattaacaatatcaagaacattccgggtgttgcgtacgatatcacttgtcaagatatcgtccaaacaggtcagaccatcaaagatggaaacggctggctgactgcgacgcacttcattatatttataattcacggctttaaaggcttctgccacatccgtacgttcataaccttgcgcatcgtagatagtgacggtagcctccttcactttctctgccccatcaacattggtcacatgtttaaaatagccttcatagttatagggagtattaatgtaatttttactgatatttgatactacattgcgaagcatttttttataaaccagcaattgcccataaacatcaacagcaccaataccataagtgaccggacgcaatttaatcttgaaatcaggcttgtcacgcaattcataaaccttaaattctgcaggagcatagccgactgcagaaactctgactttatgcacagcatatttatccggaacaatcagttcgaattttccatccatatcagaagctactccggcaaccgtgccaagcaatcctagattggcaaatgccaccggttcgtttgtgctgccgtctacaatagttcccttcaatacaatttttccatcattctgtgcattgacaattgtcagacagccaagcatcagtatgagcagtgaaatcaattttctgttcatcatcttctttatcttttaagtaattctgcctcgttttacgctacgaatctattttaattttatatatttgccccaaagtaagcaattataatgcttaaaacaaaatgtgtttataaataaaaagagcaatattatatgagaaaaacagtattatacgttggtggattcattctcttgtcttcaatattgggttcttgtgtgtcaaaaaagaaatttgatgagctggcaagagcaaaacgcgaatcagaccgtaatgtgttggaattgaaaaaagaaaaaagccaattggaaaaagatttgcaaacagcaaaagaagatttcaataccatccgctataaactgactgaaaataatgctactaaagacaaaaccattgatcaattatacacccaactccgctcattggaaagcaaacaggtagaattaaagtctgagttgagcaatgttgccgaccaaatcaagaccactacccaatccagcagcgaacagatttcctcactggaaaagagcctgcagaaaattacagcagaccgagaccagctacgtaagcaactgtcggaagtgcaaaccaatctggaatttgaaaaccgcagaatcaaaaacgaactggaaacagccactgccaaagccagtggcaaggatgcagaaattgccaaaatgaaaacagaatgcgaggagatgacgaaaaaactgaattggatccgcaaaacaaaagctgaagcagacgctgaaattaaaaaattgacgaatcaagtgaatctcttgaagaaagaattgaataagtaaagatatgctttatatcattttaggaataacagggctgctaatcatagttgccctgtttacatatatcagtaaacgcaaaaaagacgaaccggatgaaatcgttgctcccccggcagaatgttgcggagctcatgccgtatgcgaaaaaggattgaaaaaagctgatacccacatcgattattttgacgatgaggaattggatgctttcaaaaatatggaaccggatgcttatacggatgagcaaatagagatgtttcgtgagatattatacactcttcgcacggaagacctggaagattggctcatcagtcttgaaaaaagagaaattaattttccaactgtactgcgtccggaagcatatgatatgcttccttaaaagccagggatttgttttaaaatctctttactcaaacgacattgcagacaacggtgtttttcacaatattcccgcgtaatttcaatcaaagcctggctttgcaaggctgtatcggccatacagcccgattctttccacgcacgaattatataattgtcttctgccggacattcctctaaccacgaaagtgctttttcacagtaattttcctcgccccgctctttgccatagagaaatacaaaaggaataatggaatttattaaaagtattttcttcatagaatcccccaaacgatgcttccgacgagagacagagactcccggacgaaaatgtgtctcccaatattcggagacctcaacctgcaataatttatatacgtctttaatggaagatgcctgcaatacaccggaaagcaacattctaaaatcctttaagattcccgccaaaagagccagacgaatcgtaggaaaagttcccggacgtatacgcatgaatttccacaggccggaaggcatgacattcaactgatgttttatctgtaagaaatgaaattcctttttcaaggcttgcacatattcatcttcctgtgcttctgcccaaagaccggcacagcctaacaataatgcctccaacgaaaataaacggtcggaataacgcaataacacacgataaggcaataacaggctcaattgataaaatggctcagcattgacattgccggtccaatatttgcaaatcatgcgataaaaacattcttcccaatcatgatttgtctgctcccatattgtgcggacatccctgcattttcgctcaagacgttcaatcgccatcgcctgtaatgctatctgcaaataaaaggaatctattttttccaatgcataatgacagcccggatgcatcggattgcccgatatattcaggtattcgcgatataaccggtctgcataatccaagaccaccgtttctatttcacgtccttgactgttgtatattgcaacatcagcattgagaaccactgaaagaattacattatcataagctgtatcatgctgatgattatgccgattccaatcgctattattacaatgtacctctacatttccagcccactctatcccatcaatacgaatccgggaattaaaaaaatcgggacctgcatctctattaaaaactccggtatcaaccacggaaacctgcttgcctgacatggttgtaaatactctgtttttaaacaaagagtttttccaaagatattgtaaaaattcttctttcataattcttattaatcacaaatcattatgcaacatgaaaaattataaataacaaatgtagaaaaaataatttcatcctttcgaataaaattaatttatcctgcagatttgaccttttcttacaaattatactacctttgtcaaattgaggttgatattataaatgtaaataacacaaattatggaagggaacactttacagaaagacaaaaaaagcaaactgcttattatcattattgcttgtttaagtattatcttaattgcattattcattttctttttgcttgaaagagctgaaaacaaagagcatatagcagctattcatgaagaaaaagaattgttgcaacaagatttgatggaactaagccataattatgatgacctaaaaacaaacaatgatactttaaacaataaattgattgctgaacaggaaaagattgcaactctgatggagaaaatgaaaaaattcagagacaattcatatgcagaaatcaatcgatacaaaaaagaaatcggaactttaaagactgttttacgtagttatgtcgtacagattgactctctaaaccagttgaaccaaaaattggctaaagagaatacagaggtacgtaaacagatagattgggtacgtgaacgtaaccaaaaactggaaaaccaacagaaagatatgaaagaagttattgcacgagcaagcgcactgaaagcagaaaactttgttgtagttcctgtaaacaaatcagacaaggaggtgaattggaaaaaatgttttaacttgaaagctgaattcgctatcagcaaaaacattacaaccaaacgaggagaacgtacaatttacctgcgtttgaaacgtcctgatgaaaaagtaatcgctttcagcgaaaaatcatttttcaaatatcaaaatgtatcactgacatattccgctaaacgtgaaatcacttatgaaggcgaacgtctggaagtagcaatctactggcctaatgacggtagtctgacaaaaggaacttatacggcagaattgttctgcgataatgaagtaatcggtactactgaatttactctacgataaattctaaatattcaatttaaccaacaaaactatgacagatatagaaatagcaagtaatgtgactttaaaacccattacacaaatagcaacaaaattaggaattgatcctgatgttattgaattatatggcaagtataaagccaaactgccgctgaaccttattaatcctgataatatgaaaggcaagcacctgattttggtgtcggcaatatctcctactcccgccggagaaggtaaaactacggtatctatcggattaacagaaggcttaaaccgaatcggtaaaaagacaacggttgtactgcgcgaaccttcattaggtcctgtatttggtattaaaggaggagccaccggaggcggctattcgcaagtattgccaatggaagatatcaatttgcactttacaggagactttaatgccatcgaaaaagcacacaacttattagctgccttgattgacaataatgtgcaaaacaaaacaaattcattaggtctagaccctcgaacagtgacctggaaacgagtaatggatatgaatgaccgctctcttcgtcatatcattgtaggtctgggaggaactagttctggtataccaagagaaaccggatttgatatcacagcagcttcagaaatcatggcgatactctgtctagcagagaattttacagatttgaaagaacgtctaggcaatatctttatcggatatacttatgacaaacaaccaatttatgcccgtgacttaaaagccaatggtgcaatggctgccttattaaaagatgccataaagcccaatttggtacaaaccattgaagggaatccagctattatccatggtggaccattcgccaatatcgcacaaggaacaaactctatcattgcaacaaagatgggtttgtcattgtccgattatgtagtaacagaggccggttttggttttgacctgggagcagagaagttttttgacattaaatgcgtaaaagcaggtttgaatcccagcgccgttgtattagtagcaaccattcgtgccttaaaatatcatgggggagcaaaacttgacagtctgaaagaagagaatttagaagctctgcgcaagggtattgaaaacttggaaaaacatgtggaaaatatgaagaaattcaatatttgtcctattgttgctctaaataaatttatgacggatactgatgccgaaatacaaattattgcagacaaatgtgatgaattaggcgtgccaatggaggttgctgacgtatgggcaaaaggaggtgaaggtgcagaacctttggctaaattagttgcaaaagttgccgaacagtgcgtatgcaaattaaagcctatgtatgattggaactggagtgtagagaaaaaaatcgaaactcttgccaaagaaatttatggagctgcagctattgattatacctcacaagccaagagtgatttgaaaaaaatcacagctttagggctggataaattaccggtatgtgttgccaaaacacaaaaatctctttccgacaatccaaaattattaggacgtccgaaagattttgttgtcacggtaagacaaatcgaaattgccgcaggagccggatttgtgattcctatcactggagacatcatgcgtatgccaggattgcctgataaaccggcagctgaaaatattgatatagacgaaaacggacatatcaccggcttattctaaatatcaattgtacaaaaggtggaggtgtgtcaaaatgcgcacctcctttttttacgcacaaagccccgactttcacaagcaggggctttgttattacctaaagattcagtatctttaggcataagattttctactatgacaaagatacattatcgtccttacaatcccaagcaaacagtgctttttcctcaaagaattgatgaggatattgcagaaaacgatccggtgcgcatggttgacgccctggttgagagtctgaatcttgaaagtttcagaaagttgtataagaaatgcggccgcagcccttaccatcccaagatgatgctcaaggtcattctatatgcctatatgaacaacatctactcctgccggaaaatagaaaaactccttcaccgtgacatccattatatctggcttgccggctatgagaaacctgatttcattaccatcaaccgtttccgtaaccgggtgaagaaggaaatcaatgaggtgtttacccaaaccgtactccttctctcttccaaaggtttcatcagcctgaatgtggaatacattgacgggacaaagattgaatccaaagccaacagatatactttcgtctggcgaaaaacggttgagcataaccgtgaacgcctgatgaagaagatacatgtcctattagggcagatagacgatgtcattgcccaggaaaagtcatcggaaaacaatgaggaagttgagttcactccggccatgttgactgaaatggcaggagaattgcgccatgcactggaacaagtacccgagccttccacaaaagaggaaaagactgcactgaaaaagaaacgcaaacagctaaaggaactggaagaacacagggacaaactgcaggaatacgacaatcatctggacacgctgcaagagaggaattcctattccaagacggacaaggacggcacttttatgagaatgaaggaggatgccatgcgtaacgggcagacgaagcccggttacaatcttcagatcggcaccgagaaccagttcatcaccgattttgccctcttcccgaaccctacggatacactgaccctgatacctttcctgcaatccttctcaagcaggtatggcaggctgactcatacggtagttgccgattccggttatggttccgaagagaactatcgcttcatgtcagaaaacggcatggaagcctatgtaaagtacaactatttccacatggagcagcggccgagattcaaaccggactcgttcaagtccgaaaacttccactacaatgaggaatatgacttctgcatctgtcctatggggcaaaggatgcagaggataggcaccaggtatgtgaaaaccgcatccggatatgtcagcgaaaatgcccggtacagagctatcaggtgtgaaggctgccccctgaggtgccgttgttttaaagccaaaggaaacaggacgatagaactgaatcacagacttaggaaatacaaacggaaagctaaagagttgctctgctccgaggaagggctgaaacacagagggcagagatgcatagaaccggaagccgtgttcggacaaattaaaaacaacatgaactacaaacgcttccgacattttggaaaggacaaggtcttcatggactttgccttctttgccattgccttcaatataaaaaaatgtgtgcaaaactgacaaaagaaggcatgagctggctgattggatggttttataagcttataactgctgtttttagatgctgggaacacataaatcaaagaaatcctcgaattatcgcagcataaagaaaatgaaccgatttgtatagtgatgaacaaaaaagaaggtgcatcgtgcattacgacacaccttcatttaatttttctacttccagaacttatattaagatacaaacaatatgaaaagtagcggcattgcatttattgtcggaatcatctttattatattaacagatactgcttttggcttacaaatcagaagatttatcagaaaaaaatggcagttatctctctatgtttttcaaacactatttttcattaccgccatattactatttcatttttccatttctaaaatcaaaggtcctgaaagctatttttggataggtaaattatttggagttctcgttctgttttatattcccaaactactcttgtaataagcaaattttaaatcgacaattttcggaaaagtaaaatcgacacaaataagtcgagacaaaatgttaataatatcaattaaatactatagccaaaccctatttaaaggggattatccttattctttatcattgtcaaagatggattttctatttcccattctgtagctttgtccagagagtttaatgacttcacaatgatacaaaagccgatcaagtatagcagaggcaagcacttcatcatccagagtttttgcccattcagtcggagccttgtttgttgtgattatcaaggacgctttctcatggagagtgttgattaggttaaagaaacccgctgcatcttcttttttcacagggaacagcattatatcatcaatggcgacgaggtcagctttcaacaaacggttgtaggcagtcatggcagatggcatcagtgttttcattttaatggtgtttataacatcttccatcgtaaccatgtatgccttgtaaccttgcgataccgcttcatagacaagtcctgccgcaataaatgttttcccggtaccggatggtcccatgagtatcagattgtaattctgttcaagccatccgagatgccttaattcacgcagtcttggtgcggttatgccttgtgagtaattatggtcgaaaaggtctaggtcgtgtcttgacggcagagaagctgcttttagtcgccgttgtaagtctttgctatccctttccagaacttctctagcaagcaaatcatgtaaaaattcaacataggtcttgctctgttcccgtgcaatatgggcttcggattccaataacctcggaagggcatacaagcgtaaacgcgagcataaatttttaatctgttcgttcattatcatataaaaaaggtattgaatgttgatatgtctgttttatcgggcaccatggaagaggtatcggaggatgggaccggctctgtttctacaggaacttccacaagggcctctcctttgtggactctgatactttcggctactttcatcaggctacatccattaaagaccttcacttccaaacatcttgtaaaggcttctatcaacgtgggttctgtatagaagggatatcggagaagtataaactgcaggttgtctctatagttacgattcttatgaatgcgtagttcagataaataggtatcaatgaccgtatccccgggaagtcttttacggacagtagcctcgtaatcatccaaggcagcttcacggtctcgccgatgtgaggtattacttattaactgtcctttatctttgcagattttgtgtgctgctatatttttccctgtttcaaggctgtaaatatacagcatctcttccttttcttccagatatacctgtgttcggtgaccttggtaggtacctgtaggaacactgtaatagttccccttgtaggtaatcacgttatccttcctgacatgatggggtaaaagctttggggaagggattgtcggaattccccgataaggcatgagatggggtctttccatctcgaactccactgatgggatacgacgtatgccatgatgctccataccgttagcagtacgttgcaaccatgcttgaacctcctcgttgagttgctctatggaggtaaattcacgtccccggagaaaattgtactttacgtacttcactacgttctctatctttcctttgctttcgggatctgatttacggcagaacaccggctcgaacccatgttcacgaaccaaggctcgaaagccgtgggtaagtatcaggtctcctaggttctccttgacaagaaaaaccttgtcctggtcataaactattttccgaggtactcccgagaaatattcaaaggcaagttcgtgggcataaactgcaagatcggtagtaaacggggtacggctgaaataaataaatttataacggctacggctaagactcattgcaaaaaaatatactttcaagggtatgccttgcgaagtcttcatccagcgttctccaaaatcgcattgggcatattgaccataaggtgtttccggttgcttctcataaggacggtaactcttttccaattctttgggcagattatgattcagacgtactcggttgacaaagttggataccgttttagctgtgacatggggaaggtctgtaaaatgttcccgtaaacggtcatggagttgcggagatgacaaaaatggccatttgcgtaactctccgataacataagcttcataatcatcaagtttatggctgtatcggcgctcgtaactttgactctgcttaaactcttcttctgtcatagacagatacttggacaccgtttgacggtgaagacctaatgatatgcctatttgactcttgtttaggccatttgaaaataattctttaactttgtaccacattagatacttctgtaatttggaagtctcactcatagcattgtgattagttgttgacaactctaatttacaatgctattttcttttattctattgtcgattttacttttccgatttttgacgatacaaaattaccgattacaactctatatcatagtgagaggtatcggattctgtttaaaaaaaattgcacctaaattatccaatacactacactttattgctggatgcctcaccattctttcattttgttttttactatatggcatcacatggggacgatacaattacagaatagacaaagtggaagttcctatcggtaatctaccaaacagttttaaaaattttaccatagtacagctgtcagatattcatctgggaagctacggagaaagttacaaagggatggaacaattagtcaatgaagtcaattcactaaaacctgatatcattgttttcaccggagatatggtaaacaattttgctgatgaaatgccctattggattcctacattaaaacaattgaaagctccctatggtaaatatgcagttactggcaatcatgactatggagactatacacgatgggccagtcaggaagccaaacaagacaatatgaagcgcttttatcataatatgcacgcaatgggttttaaaatgctaaataattctcacattcccattatacgtcaaggtgatactctgtggctggccggtgtcgaaaattgggggaaaccgccattccctcgttacggaggcttatcaaaagcgttaaagaatttgaaggctaaccaaagtatcatactgttatcacacgacccatctcactggaaagcagaggtgctgtcatcaccagtttcactaatgctttcagggcatacgcatgccatgcagtccggcatacgaataggaaataaagaatggagtccatccaaatatatctatccagaatatgatggcttgtatcaaaaaggaaatcaatacttatatgtcagtcgtggtcaaggatatatcggctatcccggacgtattgggcttcgacctgttataactctattgactttaaaatgaaacgactacaacactcaggctttgcgaaacaattgattatatatcttttgactacattgattatcacctttatagtcatatcttttttaataatcaattccgtacatacaaattggatcatactgctgttacttagcggaggtctgattatcatgtgtatcggcatcatttatattgtccaccatttgtcggcacctttgacacatttaacaatagctatcagacaaatggctgatggtgattttaaaatagtgataccacaaaaaaagtcaagtgcagaaatcaatgaactatatgcttcatttatttatatgcaacaaaaacttattgactatattgagaagctaaaacaaacaactattgaacaagaacaacgggaatccgaaatgaacatggcccgcagaatacagcaacgctttttaccacaccacatagaactgcccgatagcattgaactggcagcagcactctaccaatccaaagaggtgggtggagatttatacgacttttttatcaccaataaccacctctatttcactatcggagatgtttctggcaaagggactcctgctgctttatatatggtatctatctgtaaattattcagatatgcttcgcagacacatacatcgacagccactatctgcaatataataaacaaacatatgtgtgaagatacagaagatgacatgtatgccaccatattcatgggaatattagatcttaacaccggcattttaacctatacaaatgccggccatccctaccctctcattatacaagcttctaaaaacattgaatatattgacagttatttggatgttcctgtcggcatcttagaagaccatcaatttgatgaatatacataccaattgacgcaagatacttctctcctgttttatactgacggaatcacagatgcagaaaatcctcaaggccagtttttcggtaaagaaaagctagtagaaaaagcaaaatattgcaaatttcatacaccacaagaatctgttgaagcgattctacaacagataaaacaacacattgacacacggcatcaatctgatgatttaaccttgctattgataaaatactgcggataaggttatttcaataccgtcgtcacttcttgcaaatatgctttcagcaattccttatttcttgaaagcgtatctccaacaataaactgcttgctctgcaaattccatacacttaatccatcatccgaaattacagctgcagcattgggataggaataaaatgcaaaagggaaagcaagagttgacaataaattacgactatatctataaccggaatgatctatacccaattgtgccaatacagtggcaatcatatcggtttgcgacccaattgttgaaatgacagaatcttgcacatttagcgcaccaccagtcaataacaagggtatatgataagcttccggcatattagggtctacatgtttgatatgccttgttccatgatctgccatcagaataaaaagagtattatcccaaattccagactttttacatttactgataaattctccaatacatttgtcgctataatgaatagcattcataaacatatgttcgatatcatttccaggaaacttcacttcaccaggaaccgtaaatggttcgtggctgctcatattgaatgccatatacataaaaggctgtttcgcttttgatacatcctcatacagtctttcaaacatatattcatcatgcactccccacttaaaacgattttcaattgcttcgcccgaaaaatcgtcttctgttaccatctcctgaaaactcatcgtaacataggagcggaaacttccaaaattgatgtctccggcataataatagcgagttgagtaacctgccttttccagatctttaggaaagcatggatagttcatgattttatttggatatttaattaatgctactgacggatttgaaggaagagcacttatggcagctaccatgccacgatcagaacgcgaacctgtagcatagatattggaaaacaatacaccttcttttgtcaatgcattcaagttgggcgtaacatccggcagtccgcctaatacttcaatcgcattcgctgtaaaactttccaacaaaaggaaaacgatattcggacgttctgttttcaataaatgtgggaactctccttctgtatgctctgcatctgttataatttgatgcgcttcctcttcagacatgaaagaataagccttatccaatttctttttatgcatcaattcataaacaaaattccatactggattaatggcagcttgattagcgtacatatttgtcgcatgaaaaaatacaaaactactgtttaacggagcaacatttacacctcctctaacaggtagaagcatcaaccctccaataatcaaatataccggaatagtacgataatctttactttcgtaatgcaacgtaggtgaaatccacacccgaaaaatcctccatgcccccaaaaagaagataaacataaaaaccaccagagatataatcaaccaaacaggtgttgatgccattgcttctttaggggttttcaaatacatcaaaggcgtagtatcaatatgatacccccagtttttaaaaagctcgagatcgatagtcattacaaccgtaaagaacactaaacaaacaattgtcaatacggaataaataaatcttataactctctgatttaaaaagcaagatattgccataataacggacgaaagcatcattatatagccacctagggacatatccaaagacaagcctttcccgataatatgcccgatatcaccgactgttaatgttgttgaatcctgccattgatacaacaaaaaaataatcttggccactactgataataaaatccagaacagataatatttcaataaaaacaacaatttagctttcataatccttatatcattataatatcttctaataaaactgcttaaaatggagcttctcccatattgtccgcaacatcaaaactgccacgcagactatcaagtccttgactcaaagttggcattggttcatcattcatttttgaactgaaagtttgagtgaccacctcttctgttatagatgttgatgcaaaaggtgatgaattttccaaattttcaaaacgagtcaattcggcacggaaacgtaaatttacttccccaacagcaccattacgatgctttgcaacaataatagtggctatacccttcaatgagttaccctcattatctgtttcaataccatatttttcaggacggtgaataaacattaccatatctgcatcctgctcgatagatcctgattcacgcaaatcggacagcatcggttttttatctggacgcgactctactccacgattcaactgagacaatgccatcaccgggatacttaattccttggcaataattttcaattgccgtgaaatcatactcacctcttgctcacgattccctcgcatgtccgctccagccgtcatcaactgcaaatagtcgataatcaatacttttatcccgtatttttgttttaaacgacggcatttggccctcaattcaaaaatggataaagcaggtgtatcatcaaccaagatgggagcttctactaatgccttaatccggctatgcaattgctgccattcaaaatccgtcaatcgtccggttttcaatttttcagaagctaactcagtttcactggctattaaacgattcaccaattgaacagccgacatttccaatgaaaagattgcaacacactgtttatgaacaacagccatattccttgccattgacaaaacaaaagctgttttacccatcgcaggacgtgctgcaataatcaccaagtcagatggttgccagccggctgtcatttcatccaatgcaataaaaccggaaggcactccgtttattccatccggctttgaagctgccatctggattccctttatagcttcatcaatgatgggtgctatttcttctgtatctttcttgatatttccatcagcaatgtcaaacatagacttttgagctttgtctatcaaatctgacacatccgttgcatcatcataagccaattcctgcaactctgtacaaatgccaatcaatttccgctgcaaatatttctggataataattcttgcatggaactcaatatgtgctgccgaagccactcgcgaagtaagctgagacaaataataatatccgcctaccatctccaactctccactttgttttaaagcttcactgacggtcaacaaatctaccggctcgtcattcacgcacaatttctgtatggcacggaatatccgctgatgtatatctttataaaatacttcaactttcaacatctcccctaccattgcatacgcatccctttccagcatcaaagcccctaacaccgcttcttccaaatcaattgcctggggcggcattttaccatattctgcctgtaaattgcttacagttttcttctcattaaaatttggattcttagccatacaaaaacatttaacttctaagagatactcctctccttaacaattcccaaaaacatcttgctgtagcctctacatctgccaaggcattgtgtgcatcatcaaacccctcaccaaataacatttgatgcaattccatcaacttcggtggtttaaatccccttttacccggcaatttacaataattggttgcactgcgcatggtacagcatttaggctttaaaaacaatgttgtcatcattcgcaaatgctcaaattctgcgccaacaatgcattcatcaaaacttatattatgccccaccaataattcagcagcatctacctgctccgcaaactcatccatagcctcttgtaaagggactcctttttcatttgccatcaatgtcgttataccatgtaatcttgacacttcaggaggaattacaaatccttcaggacgaataatcaaatcccgactatttagcttatttccttgattatcgtaagtaatccaagccaattgcaccaatctgggccaattgtcaacatctgtaacaggagcattccagcgtttaggcagaccggtaatttctgtatcaaaaaacaaatacataccctatattctaaaataacaatgaagaattccctacaattatccataggaaattcttcatctcatgccggataattggcaatattagttaaaatcactttttttcttctgtttcaaaactcttgttatactggtgcattgcccggtaactcattcccatgctagagaaaccgccatcgtgatacaagttttgcattgtcacttttctggttaagtcagagaataatgcaacacaataatttgcacactcttcagcattggcatttccaagaggagacatacggtcggcaaagtcaaccaaagaatcaaaacctttgataccactacctgcggtagtcatcgtcggcgactgtgaaattgtattcactcgtattttcttttcacgaccataaatatatccaaagctacgtgcaattgactccaacatagcttttgcatcagccatgtcattatactcaaacattgtacgctgcgctgccacataagaaagagctactacagacccccactcgtttatggcatccaactttttagctgtctgcaatactttgtgaaatgagattgctgaaatatcaagagtcttagccaaaaaatcataatccaaatcatcatacggccttttttttctcacattcaatgacattccaattgaatgcaaaacaaaatccatcttaccaccaaaatgtttcattgactgttcaaacaaattagtcaaatcttcagagctggtagcatcagccggaatcaaaggtatattatttttagctgcaaattcctgaatatctcccatacgaatagacaacggtgtatttgtcagcactatttcagcaccttcttcaatgcatttttctgccactttccatgcaatagacatctcattcaacgcaccgaaaataattcccttttttcctttcaataaattataagccatcttttcttcgtttaattttactacatatcttgctgcaaagttaagaataaagttagaaaaactcctcgtttcactttaacaagttttgagcggcttccaatgccgcaacagaaatttcctctccgctcatcattccggctatctcctttactcgttcatcatacgataatttacgtatatgcgaaattgtaaaatcttgattatcttccttataaaccttaaaatggcaatcaccggccgctgctatttgcggtaaatgagaaatactaatcacctgcatccgcgttgccatttctttcatcatctgtgccatacgatgagccacttcaccagaaagcccggtatctatttcatcaaaaacaataacaggcaactgtttgcttcctgacaatacgtattttaatgccaacattactcgcgaaatctcacctcctgacgcaactttagcaatctcgcccggctgctgatttttattggctgaaaataaaaatctaacatcatcacatcctgtcggtgtaaaatgctccaaagcaaccaactcaacaacaaattctgcatgttttatccccaatcctaccaataaacgcttcatttcatcacataacaatgcctgagccccctcccgcatatcatgaatcttggttgcaagagctttcatttcttgctctgcctgtctcaacttcgattccaacgcagcaatttcttcactacaaccttgaatgctgttcaactgttgttctaaagattcatatatatccagtagatcagaaacatcttccaccttatatttatacaacaagtcatacattacattcaatctttggttaatagcctctatccgtcctccatcatattctacaccttctcctttgcgctctgcttcgtccgccaaatcattcaactcgataatgactgattcgatccgttccctatattcttttgcttcaggccatgcattctcaattccctccaaagaatgtctcgtctcttttaacacagagattattgcttgctcattatcacgaatattccaagccatgccacccaaggcggatttaatagactcagcatgattcagcatatccaattcctgttccagttcttccttctcaccatttttcagctgagcattttccagctgactgaattgaaaacgcaaataatctccttccttctcggcatcggctgctttatcttttaaatttttcaattcaacagtccatttcctatactgataatataattcatggtattcagccaataacttcccgtttccacaaaaagaatccaatatttcagtttgatattccggctgtcccaacaacaaagactggtgctgagaatgaatatccaccatgtaattaccaaattcctttagcaatttattatttaccggagtatcattaataaaacatcgtgatttcccttcggcagtcacttcacgacgcacgacaacactttcagagtaatccaagtcattctcttcaaaccaactctgcaaattatatccgcttacattgtagacaatttccaccacgcacttcttggatttatccattatcgccgcagaatcagccctctgccctaatgtcaaaccgatagctccaagcaatattgattttccagctccggtttctcctgtaataatagaaaatcctttgcccaaatcaatctctgtcttatcaattaatgcgtagttattaatactgatactctctatcataatttgatttcaacaaaataattatagaacaaagatataacttttttattcattttatttgcctttatctgtgatttacaaacatttctgcaacaatctctttcagtgcttcttgatgctcttctgatggttcaagtaattggttgcaaacttcggaatccgagatataatcgtatatatatatattcccaaccatccactttcccaaaaatcgaagttccctcctatattttgtgtatcgaatacaacctgttcaagagcaccaagatcaccatccgaatagtttcggtattcaagattaaatgaacttagaagggaagccacttctttcttaaaaaattctatatccgttataagcattatttcatgtctaaaattaagaatttagcattcatattcatttaaaatctttatcacatggcgcattataatcatatgtcaagcgccagccatcatttaacaaagacaatgcttctggagatataaaaacattatttttcttagtaaagcattcattcatagccttcattatttctttatagattgctgccgcttctcctgaactatctacaaaaacagctatacgaccagctattaaaactttttcagctttttcatatattcctcccgtacttaattcgacacctttaggattggatgaaagctcgattatgcaatgaaatgaaccatctttctgcttcacaattctactattcaccttactatttagtggttgaaccatatatctattatccatagatatccagttaccataattggtatggccgagctctgtgaatttggatatgctgttttctcttcttaccacttcactattaaatgttcccatcagaacatattctattggaattcttttttcgaccttggacatcatcttgataatgtccaacttagttaaaaagaaaatttgctgtttggttttcatatgagaattaattatgattctcttgtccttatttcttttccatattgtgacaaataaccatatacatgagcataaataaaaaataaaataaaatactacatatcttactaccagcccactttcttcataaacttcatctctttctttgtcataaaagaattttattttttgtggatcaaaccgtatgcatttatttctggcaattcctacataatattgctttccattgaactctatgagtatggatgatgacattctacgacggcaattaacttccagtaccgaataattttgtattggttcctcactattgaatatcgtttgtctatgattgtatgaaatccaaacatagatagccaatgctaatacaccaatgtttatcaaagctacccaacaaacatctttcaatgttacttttttcattttattactgttaaagcgatacacttcgaatcatctacttacaaagttacttttcctttgaaggaatctttggctggggaataagcatcaatccataattttcttcatcgcacatgcggaaagcaagactccatggtttgaattatttcatcaagtcgaggaatatactcaatgatattaggctcatgtctttcagccatttgatacattcgtgatagtactaattccttgacaactggataatcttgaggtgatactatccgagttaatgtaagatacctgaatgcccaatctgctccgacatcaggcaatgttcttttgcctttcaaaattggaacaatctcatggtaaaacatatcttgcaacgaattgtaagatgaaaagaccatttccgaacattcggcaagcgtgtcacgaagtttgaagtaatgacggtcgaagtctgcttctgttattgtaaagttatcctgtctttcaagcatcttaccactaaagcccacagacggattatccctttggtcttgcagagatttaaagctatatggttcaaaccatttaagcagaatatcgaaacgaaccatatatataggataaatgataagcaatccgtttttattccaatgatccaattctataaagcgacgtaatccataattctgccagataaaagtcgaatcgcgcttcctaaacttaaatccgctaagaaaagattctgtttcaagccgactaaccactgtattaaataattccatgtttttcatcatttcattttaagtgttagagagtataatattcaaactcatatccagcattcaataagaaatcatttactctcgataaaaacgacattcccatatcatttggcttatatttcaatgcaacacttattgctatttgtctgccctttgatgatggatattttttttcaatttgtccggtttctattgccgttaaataagcattgatcttttcctgtaataaatagatatgtccatacttatcgtcccactccaaatgctccgagattgttagaacaattctgccatctttctcactgatgaaatctattacttgcaaattatctactgacataatatctaatactgattttattctttccaaaaatctgaagaaggattcaaaatgccagaaatttcagcttccttttcataatcaacgactaaaactgattcgtttaaaacatacgctttttgttcatagcaattcagtatagatttaacaaaagaatgtaatgaatcatatattgtaatcaatttatcacttaatgttattgatggcgaggaaaccaataatttcccaaaattacaactgtcctcatttaagtcaatacctataaaatccccggaatttgattgtataataggtaaaacttgatttaaatctttttgtgttgcttgatctagtaaatataggctgatagctgacctcaaatcaatacagcatccatatgaacataattctatatagttgttatcaaaaattgaggctccattaattcctcccttccatgaataaaaagttataaggtctctacgtggatataaatgagtggatatcaaaatgtctaataaatcatctttagacattggctgttcagaattacgtaaaaacggatggttaatatttcccaaaattctgtctagtgtattcaaatcttctatcatgataatttgttttttcagttacacagctcacgatgtaaaaagttattgtcattcatttgtcttgataatatgctgtatcagtattcctctaacatataaatgcaaaaaatctcgcttgctaatcttttgttttaaagcaccggatttaattattgaaaaatagatgcatatgtttattaaagggagcatgacaataatagaatccgtaatatttacacgatactgaagtaaatcaaattttgaatacttgtttcgtgtgtaatataaatccaacaaataggtgttacatattccgatagtcaatacaaacaatggggttatgtcatgacctttaatccatttaattagcagcgcgtatattttattgtcatacatgatttggtataagaaagcgtgagaaaagaacatcaatacgatgcttataatccctaatgaatatagggctttatcataccatataaaattattgattaaatggagtatagttatgattattaatccccataatgctatcgacaagacagatgcggtcaacacaaataatatcagaaaaaacttattcatttcatgtattatttcaggtctatttatggcacatcctgattttgccagaaaatgccaatattgtatcacttacccccttgggtctaaatataaatgattttcactgacgatttgattaagcctctctttccctatggggcatttaatatatagataatagtcataaccaaattctatttttaatttctttgacttgcaagaaaacttaatatagcatagttctcttaagcaaagtctgaacaaaacggcagccttattttgtgaaactctctttcccttttttagattcgggataaaatctaatactggtatattataccgctgtttgtgttctttcatgcgttttattatctcatcttcatacgcttcaacatattctatcgtaagataatggcaatctgtttcagacatcaccgtcaggatggtatttacataactatcttctacctttatataatcatctgcggataatatgccggttctaaaggtttttcctatatctgaaatagaagtccaatcgtcatatgtataaatacgatctttatatccagctggatgatattttactacttcgtgaaaataagtattcatatacaattatttaaatttgaacatcccgtcattttagtctttacacacatacgaaatagattttactctatagatttaacacttctatttattttgggattcgaaggcaaatacacaatatctaaagtgtctccaatgtctaaatgccaatcataaatagaactaccgctatatactttattttcaacacgaaatttgtaaactctaacttttttatgcctttcggtatatttcttttgtattatagcctttgtgcaaatcccgtcatttcttaactgataattttctatagtacgtttcgccattacaaataacatatatacacctaaagcataaataattatatttttcatatttacacccgcgtattttgtttgtctttttacgttactccttcgattcatcagcattcttgttttctaaatttcactaatagctgttcttttactcagtcaatataccattgatttgtcaatttaatcacttacccacaaagttactttttttcttcgataaatacgtcagcccgaaaataaattatctgtgtatcagatggtttttaatactttaatcacctcacgaacatattgctcatgattgaatactcaaagaatttacgatgatgacgatacgtactttcatttaatcttgatcttcaatcattttcaatagtcttctttttgcttttaaatctcggttggaatctgaaaaatcaggatcttttatttcatcaatcagttctttgcggacggatgtttttctttcatacataggcaaatcggggtctgctccgtgctttaatagctcctcggctacggtatagtgtctgaataatattgctatttccaaagaagtagaattaagctctttgaatctgaaattggggtcagcgccatttgcaagacaatagcgaacgagctccaaatcaccctgttgagatgctgcgtcaagcggagttaaagggcagattccacaatgtctgctgacaaactcattggcaaaagctatgtttatatcagcgccgtagtcaagaagcaatcggacatattttattttcttgtcttcatcccaatattgaccacatacatctgaaatagggatagaaatgctcttattgctgtctattactacttgatttgggttggctccatgcttcaatagggcttcgacggcacgtattttatcatcagaaatggcataaaacagaatcgtctggttgaacttactttctttgtaggataacaattcaggtgattgggatagaatccggtcgatttcttgtacattctgacggttgatggctttggcaagttcctcacaaggggtatctctgtataatctgtaatcatccgtagttacatgctttttgtctatcgggccgtccgtaaaataccaatatccggcatatactgctccaagataaaatagaaacggcaagatggcaggaaggtatctcctgtatttagaatacatccatacgctaacccaacaaatacccaaaaggatgaatgaataggaattgacagcaacgaaccatgcgaatgcttcacttacattggaaggattatcaaaaaagaagagggtggaataaaacacaagaggggctgcgagtatcggaagcaaaacgatgatacacaccatctttaatgccactgggtaattcttaaaatctaatttcatcatgttgtaataagaataatagtttatttcgtttctctttacagaagcaaagcggataaataagcaactaccctataagataaaacaagcttatcccatagttcaatgcttctacacaaactgttgccacaccacacagcaacatgactgcttcaaatttccagaatcgtttatcagttagcttcattgttttacctcctttccgtcaaagacatatatcactatttaatggatttgtcttagagcaactcctaccatatctatgccattattgctttacccgaattagatatgttatcaactgcccttttaagtataagataattaattccttagtgggaagtagatgcgtattcttgcgcatcttttttatgattaaatgataaattactatatttaatatgggaaacatagcaagagtagaacccgttacattaatcctatattgtaataattcatactgtgtatatttctctttaatataaaataaatctactaagtatgtattgatatatcccaatgatagccaaaccactaatgcggtagaatgctgattaacccatgactgaattcgcaaactaataattgaatcatacattatttgataaaaaaaagcgtgtgacaatatgactgcagatattgctatcgcagcccatatcttgtaaactaagatggctttagctgaatgtatcattactatgtcagctattgagaatagtattattccccaatttgcaagggaaagcactatcgccaataaaagaaacaacccaaatatcaccatgttgattgtatgagagactcttgccataaaaaacttttttatttagatgttgtggaatatcattttccctgcagatactaattttgcaccataagaccagtattttattcacttacccacaaagttacttttttctttgataaaacattcggttggaaaaagaaatcatctagacacaataggtatttttttgacttcgtgcccactcaacggcatagatttcctcttttcccctatattcaatctgtacacaaacagatgtcaaatactaatcaaagatatcaggttgttatctttgtcttatatttatgttatatttgatatatgtttgtcatatatttgagagggagcaatgagagagatgtgagggagagaaaagagaaaaagggaagaatattttctatttattttttcatacttcaatttatttcctacttttgcggcgtcaaaatcaatagacatatattttacataatagttcttcatcaaaatgacaagcagaagattaatcagaattaaagttttgcagctactctacgcctttagtaagaaagaaagcgcaaccattgcagaaatcgaacgtgaaatcctgcaaagtatgaataaaagtactgacctttactatgagacattatcattactcacagaaatacgacgcaaagcattcttgaaaatcgacactgcacgcaatcgtcgttttgcctccaataaagaccttaatcccaatacacgttttattgaaaacccggttttcgatataatcgaaaaaaataaaaagttccaaaactatatcaataacaacatgatatcttggagcgattcgcaggagactgtgttgtatttctataataaaatgttggaatggcccaaatatcagaaatacatgaacaagccatccgtaacatttgatgagcacaaacaattggttttggatatctttgcagaactgatcattcaggatgatatcttttttcaaatgcttgaagaaaaaagcatttattggaatgatgactttgaactcgtattgagtatcgtatacaaaacattatggcacatccgtgagaacatgaccgaagaggatgaattgctttttcccgtatacaaacctcaagaagatgcagaatttgcaagagcattggcgcgcaaaacatttctggaattcgacaaaaatatccagctaatcgatcagcatactaaaaactgggagcttgaccgtatttctgaaatggacaaactaatcatgggatgtgctgtttcagaattaaaaaatttcccttcaattcctgtcaaagtgactctcgacgagtatatagaaatctcaaaaacctacagttcgcctaagagcggggcttttattaacggtgtacttgataagatagtcaaacagttaaaagaaacaaacgaaatagttaaaacaggacgcggattagtggaataaaaaaaggaggtgtgtcaaaatgcgcacctcctttttttatgttattgcaattcttattttgccattgcttcatttacttgtttcatcaaatcttttacatcctgatttgctgcatccaaagactgagcttgaactaaataatcttttgcttttttaaaatcagccattgctttggctttttctgcctcaaattttgccttatcagtatttgcaatcggattggcatcctgcagaatcttagctccattattgaagaaaagaccggctaaacttacaaaaccctgcactttaaagcccttattgctaagattggtaatctgagtatagttttctgcagctttagcttcatttcctactttttggaaatcctgtccctttttcataaaatgagaagcatacattgtttccaatttcatgtcgccaggagcaaatttcataccttcctgtaaagtagccaacatttcagcttcttttttctgttctttctgtgctactgctttagcatgataggctgctttagctttatacttatttttaatagccatatcgaaatacttttcagcagctgcaaaattcttcagctttgaagcaataactcctgtgttatacacgtaagcattatccttatattctacaatcttcaaataagcttccaattgcttaaatgcttctggatagttttttgaacgcattgcagcattggcagcatttttctctgttgctcccggctcttgtgcaaaaacactgcaagttaatagcacacctaaaaataataaaataacttttctcatgctttttcttttttgtatgtgtttatatttattttcttcagccactaagatatatatgtatctgaaaataacaaaaacatttatctcttttttatcaaaatcatatatacaataaagacaaaatctttattaatccctctttatcctctaaatcaaaagcatttaacttatcgctatcaatatcaagacaagcaaatatctccccttcttggttgcgaataggtattacaatctcacttttggataaggaattacacgcaatatgacctggaaattcttcaacattaggcacgataacagtttcacctgagctaaccgcagcccaacagactcctacatgatgacgcaacttttggcatgcaaccggcccttggtatgaacgaacaattaattcatcatcaatcaaagcatatactccagtccaaaagaaagcctgcattttatggtgcaagacagcttcaattgtagccagtcttgcccatatatcatctgttgttacgacgtatgtttttatttgctcgtacaaacggtcatacttggctaactttgcgctttttccgtttactgtttccataatttcaaatagattatatcttctctaaaatatcaaccaaatgcttccaccatttttccacggtttcaatatctaccttttcatcaggagaatgaactccacgcaaagtaggaccaaatgatatcatatccatacccggatacttttcaaggaacaatccacattccaatcctgcatgaatagaacgcacaataggttctttaccaaacaaatgtttatatgactctacagctactttcaaaacagcagaatccggattcggagcccaaccaggatacccttctccatgctcaacatcagcacctaccatcttaaatactgatgccaccatctgagcgatattcatcttttccgaatcaacatcactgcgctgagaggtagttatcaaaatcgtatcattctcaacaaattttacagcagccaaattggttgatgtttctaccattcccggcatacgatagctcattgcaaacactccatgaggacaagcatacaacgaattcaacaaatcagttgtagaagcagctgtcaaaagttctgcaggaacgtctattgattccaattcaaaagtaataccaggctctgtaaccttccatacattctccatctctgctgcgtaaatattgaaagccacccgtaccggttctttcagtgattcatcaaaagcaatgacagcagaagcttctcgtgcaattgcattacgcaaatttcctccggcaaattcaccaatctgaatgccatatttattattcatttcccacaaaaagcgattcaaaatcttgatcgcattccctctacccttattaatgtcatcgccagaatgtccgccttgcaaaccttttacaacgattctcacggcaaacttatttttaccgacagcttctttctgataaggcaaacgtataacagtatcgataccacccgcacaaccgataaacatttctccttcatcctctgaatccaaattcaataatattttgccactaaaaaagcccggtttcaaagcaaatgcaccagtcaagccagtctcttcatcaatagtaaacagacactcaataggaccatgctcaatatcagtggaagtcaatactgctaaagctgctgccatcccgataccgtcatctgcacccaatgtagtaccttttgctttcacccaattgccatcgatatatggctgtataggatctttatcaaaatcatgctttgtatctgaatttttctcgcaaaccatgtccatatgtgactgtaacacaacggtcggggtattctccttacccggcgttgcagcttttgcaatcaatacattaccggcttcgtcttgacgagcttccaactgatgtttacgagcaaattccatcaaccatgctcctattttttcttctttacgagaaggacgaggtatttgacaaatctcttcaaaataaccccatacagccgctggttttaatccttgtaatactcccataagtaatgatagtttaaatatttattattaatattatttcataaaaaacggatatgatggctataccatcatatccgtcaattttttcaatacccaaactccagatttaatctcctctgaagcaatagcaaaagtcaaatccaaatggatttgttcttctattttgtttaatgtttgctgaacctgtactcccttatctgtcaaaacaacaaaattattacgcttatcctcctgacacatttttctttctacaaaaccgcgtttagtcaaagtgttcaataattttgtaacattatacttatccttttgtaatctcagggaaatagtctgctgattaacatgatcttctacccacaacactctcaataattcatattgttcacgacttaaatcatacccggcttttataaaagcacgatttaacaatttagtataacctctctctgctcgactaagataagttacaagttctcttacatcctccatgatttatgttgcagtttatactattgcaaacatagcttttatttcatgaaatcgcaaacatttgcgtcaaaaatcaagcactaccctaatgcctctccgtcttcgtaataattcatgggttgcaaataacggaagtgaatatctgaatgtggatatccggctgctgataactcttcatataacacttgcgccaattttttttgaacatctcttggacgttcaaaatagtccacttcgacaaaaggccaattattcgtgtctttaatttctccatcatcaacaaatacagaatggatattttccaatacaatatggtcgcgcggacaccctacagcctcctgaatacggtctgtcatccgtttactaacttttgccaaatgagcatcgtcgacaaaatgaaatctaaaaaaaggcatcgcaattattttacatattcataaaaaaacagaggcattgtttcctgcactttacgaatcacctcttccaaagtcgaatccatctgccctccagcagcatttatatggcctcctccattaaaccaagccttagcccatgcatttacaggaacattcccttttgaacggaaagacaacttaatcctatctttacgttctgtgatctgtattgaaacatctatattatgaacggacaaaggtatatttaccaatccctctaaatccccgtctttataatcatatttttccagttcttctttagtaattggcatgattgccaccggatagcgttcatctacttgcaatttgttcaacaatgtattacctatcaaacgtaaacgcgaaagattattcatttgatagatatgcttatgaacaaactctttgttcaatcccgcctctaacaaagcagcaatgattctatatgtttccgggcgcgaagaattatgagacaaacctcctgtatccgtacttattccggcatataaagaatttgctatatctgccgtaataatctcttttccccaaatacttgttaaaacaacatacatcaattcacaagttgacgacactcgagtatccgatatgacaatatcctgcatatccggttccggatggtggtctatgatgattctggttgctttagcatctctaacaggacattccaaatctccttcacggctagccgaattatgatctaacataaaaatcaaatctgccttttcgctaagttgtttacactcttcaggtttatccaaattagaaatagcagcaggaatgtgtttcagaaagcgtaaatattccggcactctgtcacatgtcagaatattccattttatgcctaccctacttaacacctctgccaaagctgagcacgcacccacagcgtctccatccggagatatatgcggtacaatcaccacattcttaaccccttcggccaaacgaaatctcaactcatcaatacattcatttaactctttcatatttttatattaaatccataaagtagacaaaaatagaattatttattcgaaagtacactctgaatacaaaaaaaaatcggtcgaatatttaaaattcgaccgattgagttactttttctttcctttctttagaaacgtttctttcgttgaatcttctgccatataactggcttcatgctttttcttcatgcctttcggctttttatttccagctgcacccataatatatgattttaaaattagactctcattatcagcaacaattactataccaattcaagcaatcacatattctgacataaaacatgcctttatttcatgaaaaaatgtcactgcttattggcataacgaattaacgactctttataaaaagagggattgacgataaagccaatccccatattcatcattaacttgaagtatattactcccattcaattgttgcaggtggttttgaactgatatcataaacaactcggttaatcccccgaacattatttataatacgattggaaacctttgccaaaaattcgtatggcaaatggcaccagtctgcagtcatgccgtccgttgattcaacagcacgcaaagcaacaacactctcataagtacgctcatctcccattacacctacgctctgtacaggcaacaatacaactccggcctgccatacctgattataaagtccttcttcctgaagcatggagataaagatatggtcagcctcctgcaaaagacgcactttttcagcggtaatttcgcccaagattctgatagcaagaccgggacccgggaatggatgtcttcgcaaaaatttatcagcaagccctaagcttttacctacacggcgcacttcatctttaaacaataaacgcaaaggctccaccagctgcaatttcatatagtcaggcaatccacctacattgtgatgagatttaatggtttgtgaagggccatttaccgataacgactcaatcacatccggataaattgtaccctgtcccaaccatttggcatctgtaattttagaagcctcctgatcaaaaacatcaataaatgtactgccaataattttacgtttcttctccggctctgttacgcctgccaaacgtcccaagaaaagatcgccggcttctgctcccaccacatttaatccaagctctttataattttcaaggacatccttatactcatctttacgcaacaaaccattatcaacgaagatacaagtcaggtttcttccgatagcccgatgaagcaacatagcagcaacagttgaatcgacaccaccggaaagacctaatatcacacggtcatctcccagcttttgtttcaattctgctacagttgtttctacaaatgaatcaggagtccaactttgctcacatccgcaaatatctacgacaaagttacgaagcaattcctttccttctgtactatgatacacttccgggtggaactggattgcatacgttatctcaccttccactttaaaggcggcattctttacatcagccgtacttgcaattacgcggcaattatccggaagacgttcaatcgtatctccgtgtgacatccacacctgcgaattatcactgattccgtgaaacagcagactttctttgtccacatatgccaaattagcacgaccatattcacgcttgttggaagcttttacctctccaccgaaattatgagctaaatactgtgcaccgaaacacactcctaacaaaggcaaatgcccttttatagcagataagtcaggttttggcgccttctcatctcttacagagaaagggcttccggaaagaataactccctttacagaggagtccagagccgggtatttattgtaaggataaatctcgcaataaatattcaattcccgaactcttctcgcaatcaactgtgtgtattgcgatccgaagtccaatatcaaaattttttcttgcatcttgtttgttttgatttgcgttgcaaatataagattttacttctatcttttcaattcttccgccaggaatttaccggtttcggattccgccatggcagccacctcttcgggagttcctattgccactacccgtcctcctcctttaccaccaccgggtcccatatcaatgatataatcagccactttaatgacatccagattatgctctatcacaatgaccgtatttcctttgtttaccaggcgctgaatagcctccaaaagaatatggatatcttcaaaatgcagccctgtggtcggttcatccaaaatataaagggttttcccagtatcttttcttcccaattctgcagccaacttcacacgttgcgattctcctccactcaacgtcgtacaaggctgtcccaatttaatataccctaatccaacctcctgcaacaccttcaatttctgtaatacatgcggaacattttcaaaaaattcaactgcctggttaatggtcatatccaagacatctccaatagattttccccgaaaacgtatttcaagcgtctctttgttatagcgtttgccattacatacatcgcacttcatatacacatccggcaaaaaattcatttctatcaccttcactccggcacctttacatgcctcgcatcgtcccccagtaacattaaatgaaaaacgtcctgccccatatcctctaatttgtgcttcaggcaatttctcataaatcttgcggatatctgtaaacaaatcagtataagtagccggatttgaacgcggagatcggctcaaaggcttctggtcgacaacaatcactttatttatatggtcaaatccgctaaaagaatgatatggtaacggggtttccgtagaacgatagaatttttcagccaaaatcggatgcaacgtaccgttaatcaatgatgactttccactgccactgacccctgtaacacaaacaaacatccccaaaggaatatccaccttcacatttttcaaattatttcccgtacacccttcaagcgaaaggaactctccatttcctttgcggcgcatttcaggcaatcggatactgcgagttccgtttaaatattgtgcagtaaggctctttcccctcaaaatatcctgataagtcccactcgcaacaacctcaccacctttacgtccggcatatggtcccatatcgacaatataatccgcactttccatcatttcccggtcatgctccacaacaataacggtatttccattatcacgcaattgctgcagtgaatgtatcagcttacggttatccttttggtgaagtccgatactgggttcatccaaaatataaagcacattcaccaattgcgaccctatttgagttgccagcctgatgcgttgcgattccccgccggacaaagaaatagaagcccgattcaaagtcagatagtcaagaccgacatccaacaaaaactgtaagcgtgttcgtatttccttaaaaatctctcctgcaatcttttgttgtttaccatccaaccgatgcatattcgtctctatccactcatacaagtcctgcagctccatgttggcaagttctgaaatattcttaccggcaattttatagctaagggcttcctgcgaaagacgcattccatggcaagcatcacatttgacagtggaaataaattgctctgcccatttgtttgctcttttagaagtagtattttcctcttgagctgtaatatatttgatgattccttcgaaattatacaacgtattggaggatacccccaaagccttattctccaaacggatttgtcctggatagccatataacacatccgtcaatgcttcttctgacaactcattgatcggagtattcaattcaaagccatgcttctgtaacaccgtctcaatctgccagaaaaggatactgttcttatattttcccaatggttcaattcccccctcataaacagacaatttatcgttaggtataattttatttatatccaccacatttataaatcccatccctttacatttcgggcaggctccatgaggagagttaaaagaaaaagtatgaggagccgggtcacgatacgacattccggtgtccggacacatcaaattccggctataataagtgacatgcccttggtcgataggcttcaccatcatcacaccatcgccatgcttcatagctgttgcaatcgaagctttcagccgtttgatatcagaaccgtccaccaccaatttatccacgacaatctcaatatcgtgcatcttataacggtcaacactcattcccaaggcgatttcacgcaattccccatctacacgagccgtaataaacccttttttacgcaaattttcaaacagttccttataatgtcctttacgtcctttaaccaccggagccaataatagaatccgttgtttatcgaaattctgcaaaatcagttccaatatcttttcatcagtgtatttcaccattcggctaccagtcagataagaataagcttctcctgcccgtgcatatagcagacgaagaaaatcataaatctctgtaatggtacctaccgtagaacgcggacttctattagttgttttctgttcaatcgagataacaggactcaaaccggtgattttgtccacatcgggacgctccatatcaccgataaactgacgggcatacgcagaaaaagtttccatataacgtctttgaccttctgcataaatcgtatcaaaagccaaagacgatttaccactaccgctcaaaccggtaatcaccgacaaactattatggggaattttcagatcaatgtttttaagattatgttcccgtgccccgtaaatggcaacaactccttcttcttcctgtatatcattcatattggcaattccttataaactaatttgcaaaaatacagtaaatatgtgaaagagaaaaacaccttctgacaaaaagaaaataaaagaaaggagacatttcaaagcaggactaaaaatgaatccaaattcaaaaactgcttctgaaatcagcttgttcataaacttcctctccttcgtggtgtgtgctaaataatcttaatctaactaacagctaaaatcaatcataaatttcaatcattatttgcacgtagtcaaacgtacagacgaagggaaaggttacaaaaaaaactctctctttattccgccgaagcaaataaaaagagagtttctaccggtaatcaccggaattcgataacgaaatcgttttcgctattcaatatcaaaaacacaaagccagatgcatgcaggctccatactgcttttctcgattcgatgtttggtatttttatgtatcaccatatagtccccggccttcatatctaccatcttatcttcaaactccaaggtagcttcgccctgcaccaacatgataaactcatcattctcttggtcataccaaaaaccttttggagaactatgtcctgcagatacaatacgttctactcggcaattaggcgattttgccaacagattaaactgctcttcttcacccgattgtgcgatatttgaaaaaatgctcttcaattccatgtttcaaattctaattaaatgcgacaaaaatatattaagttaatagtttttcttcttttttcctatgaatttctttcctgcaaatatagcatagatattgaatcttacaaaataattatcttcactataattaggtattttgattttcacccttcaaattcggcaaactgataccatattttacagcaaggatacgagccacaatcacagctacagcagcaataatctgagtaagagtttccgttacatccaaatacatacataaataataacataagcctccgaaaacacaagccaaagcatatatttctttacggaaaatcaaaggaacttcattaatcagtgtatcacgtatcacaccgccggctgcacctgtcattgtacccataataagacctacccacatcggataaccatgtgtgatacttttctctatgccgacaacagcaaataatcccaagccaatggcgtcaaatataaagaaagtgttattcaaacgaattacaaatttaccaaaaacaattacaaagcccaaagctgctgctgtcacaatcagataatctgcctgtagcatccaaaagggcggaacatccaacatcaaatcacgtattgttcctccaccgacagccgttacaaaaccaacaacatacgcaccgaaccagtcaaactgtttagcggaagccaaacgaataccactaatggcaaaagcaaatgtaccaatgtaatcaataattgtaataaaatccatatcactctattttttcagcgcgcaaaagtagtggttttttctgatatgttgcattttctttgctaaatttgcaacattaaccaagtaaatcatggaaccacagacattttactcccaacaaattacctctctacacaagctacttaaacaggtaaacaaacagcgcgatcttattacaatagccaaattaagtacatttgcctgtatggttttccaattatactggtttatttcctactcgacccttccccttattttcccgatactctccatcggtttatttattgtattaagtcaaatcgattcccgcattgttcacaaacaacaggtcacgaccaaactcatacaaatcaatcaaacagaaatagattatttacaaggcaatctgaacccattttcccaaggaaaagagtttctacaaacaacacacccatacgctgctgatttagacttattcggtgagcaatcgctattctgccatttgaaccgaaccatttctactggcggcaccagacaactcaccgattggttgctacacccttgcaccaccgcagcccccatcagacatcgccaacaagccgtagcagaactatccggacttccggaatggtgtcagcaattccgagcacaaggagctctgcaaaacaataaaaaaaataatctcactgccttaaaagagtggcaacaaagcaacgacttttttatccgtggacaacaagtaaaaatacttctgtatatcagcaatatactaaccatctgcgcttggattgcagtaatcatcacccctcttccctcgtccatagccctgcttctgtctttcggtcagttactggcaattgcctgtctattgaaaaaaatcaacaactaccacaatcaattgaacggatttctacaccacattagccattttctacccttagcgcacctattgaataaccaaacattcgactcgcctttaatgcaagaaattaaaaacgccttattcgcaccagaaaagaatgcactacaggcattgtcagctttaaacaaaattcaagatgcattggatcaacgaggcaatgttctcgtcaccttcattctagacggattgtacatgaaagacctgcacactcttttttgccttgaaaagtggaaaaataaatatgcatcagaaattgattcctggataaaagccattggcacggcagatgcactcgtcagtatggcaaactatcatttcaaccacccagattatatcttcccgaccattaattcaaacattccactcagggctaaagatgccggtcaccctctgatggaaggcaaaccctgcgtactgaatgattttgaaatcaatcacgagcatcagttattcattgtcaccggagccaacatggcgggaaaaagcacctttttacgcaccattggagtaaatctgatactggctttgtccggtaatgtagtacgcagtaaacaattcatttttcgtcctacagccttgttcaccagcatgcgtactaccgataacctgtctaaagacacctcctatttccatgccgaactgctacggctaaaacaactaattgatttaactgaaaaagaagaacatacatttgttatcctcgacgaaatgttgaagggtacaaactccatcgataaacttaacggttcactggctttcttaaaaaggctatataccagcccggttgtcggcctagtagccacacacgaccttgcattaggagaactggccacagaatatcccacccatttctcaaatgtctgctttgaaatcacacatgacggagaagaaattcattacgactacaaactacacaaaggagtcagcaacactatgaatgccagcatactattaaaacaaatgggattgatttaatttaaataacagtattcaaccaatttgaaatcaagcactttccacaattagacatatacgattccggatgatactgcaccccaaaaattggcagctgacggtgtttcaacgacataatatttcctgcttcgtcaacagaagtcacctgtaaatcttgaggaaagtcctccgaattcaccacccatgaatgataacgtcccacaacgacctgcccctccataccgtacaacaaaggatctccttcccctacttgagtcaatacactgtggtgtccatgcaacgggaaaggcatgttcaacaagcctgctccaaacacttcagcaatcgcctgatgacctaaacagatgcccagcatactatgcgaatagacacactttttaataagggaattcaattcgcccgcttcagaaggcactcccggtcctggagaaagcaacaacccgccatattcttccaatttggaaaaatcaatacaatcattatgtacaatgtcaaactgaggagcttcaggagcttctctcaacaattgtacgatattgaaaacaaaagaatcgtaattatcaataaccaggatttttttcatggaggcaaatgtaataataataactttgcattcgcaaaatttaaagtaaaatgatagaagcaaacaacgtccgccacgaaatgaacagaagcggaaaagaacaccgtccctttctgtttggagtagattttgaaatcaacaaaggattttttattgaggatcctttaaatgacaaacgcattctcttcaaagccggagccatctccaatatgggaaatacgctccctccctgtcctacaccgcaactagaaattttgcacacggatgctgcagcctatgcatccaaatttgaaatagtccacaatggcctgctatatggcaacagctttttactgaatctgacagaacgcacccccatccgtaccaatctcacattggaacagattttctaccacagccgagcaaaatacaaagtattgcttcccgaccgttttgtctgcttttcccccgaaagttttgtacgcatacaaggaaacgaaatctccacctaccccatgaaagggacaatcgatgccactctgcctgatgccgaaacccttttaatgaataattacaaagaagagtgtgagcactacaccatcgtagatttattgcgcaatgatttgaatatggtggcacaaaacatacaagtcagacgattccgttatgtggaaaacatacgtaccctcaaaggcgaaatactacagacaagctcagaagtagtcggccgacttccggacaattggcacaaccggataggagaaatcatcttccgactacttccagccggctccatctccggagcacccaaaccctccacagtcaaactgatacaagacgccgaaggtattacccgaggttattacagtggagtattcggctactttgacggccattcccttgacagtgctgtcatgattcgcttcattgaaaaagaaggcggacaatacttctttcgcagcggaggcggcattaccatcaatagcaaagccgaagaagaatacgaagaagtcctagaaaagatttatttatccatataatcctgtatatatgaccaatctgtcatctattgaaagtattagtttcattgaaacactacaaattattgatggacattttacaaacccaactccacacatacaacgcatccaaaccactttggcagaaacagggaaatccgatctcgaaattcccgacttcaacgacaccatcattccggaagacaagcgtcgtggaaatgtaaaatgccgttacctatacaacattcacaaaggagaaattgaatttgcagactacacaccccgaaccattcacaccctccgactcgtagaagacaatcagatagactaccatctaaaatatgctgaccgccaaaacttaaacaaccttcgggcccgacgcggaacatgtgacgacattctaatcgtcaaaaacggcgaaatcaccgacaccagctacagcaatgtagtcctctttgacggctgccgctatatcattccccgtgcctacctgcttaacggcacacgccgccgccagctcctatccaacgggacagccacagaagcacgtatcacccccgatgaccttcaccgctttcaatgcctctacctcatcaatgccatgttagacataaaaaacaacatatgcattgaaataaaaaacatttttccttatctttgaaaagataaaagcacataaacaaaacacacatgaacacactgttactatacgccatctcctacgacctgccgctaaccgacccggtattgaaatttctgctcattctggtcatcatcctggcagccccacttctgctcaacaaactgcgcataccgcatttgctaggtctcatcattgccggtgccatcatcggtcccaatggtctaaacctagtgttgcgggatagcggaatcatcctttccgggacagccggtctgctatacatcatgttccttgccggtctggaaatcgacatgggcgactttaaaaagaacagcggacgcagcttcgtattcgggatgtacacatttctgattcccatggcactcggaatacttgccggtctttatctgctccatttttccatagagacctccattctgctggccagtatgtttgcctcacacaccctgatagcctaccccattatcagtaaattaggcatcagcaaagacaaatcggtctccatcactgtcggaggcacgatgattaccgacatgctggccctattggtactgaccgtaattgtcgggatggccaccggagaaatcggcgaacacttttggacacaactaagcctgtccatcctggccttcgtactctttatcatgcttatattccccatcatcggccgctggttcttcaaacaagtacaggacagtatttcccaatacatcttcgtccttgtcatggtctttttcggagcctacctggcagaattagccggcatcgaatccatcatcggctccttcctggcgggattggcattaaaccgtctgattccacgctcctccccgctgatgcaccgggttgaattcatcggcaactccatattcattcccttctttctgataggtgtcggtatgctcattgactaccgcgcctttttcagcagtttcgacaccattttcgtcggtaccgtcatgattgtcattgccactgttgcaaaatatgtcgcagcatggctgacacagaaaaccttccacctgtccgtagaccaacgtcgcgtcattttcggcctcagcaacgcccaggctgccgctacactggctgccgtaatggtaggctacaacgtcatactaggccagacaccggaaggcgaacccatccgtcttctaaacgaaagtgtattgaacggcaccattctgatgattcttgtcacctgcaccatcgcctcctttgccgcccaaaaaggagcacacaacctggcatcccaatctgccgataaaaaagacgacacaacacaaaacagcaaagagcgaatcctcatacctgtcagcaacgaagaaacagcagaagaactcatcaatctaagccttgctgtcaaagccaagaaaaacacccagcatctgtacgctttaaaggtgctcgacaaccaatccgccactgacgacaaccagatcaagaaatcacaacgtcttcttgaaaatgctgccctttcagccgcagctacagacacccacctgcaaacactgttgcgctatgacatcaacgtatccaatgcaatactcagtgtgattcttgaacacaacatcaccgacctgattctcggattacataaagaaaaaggtatctccacctcttttttcggtcgcatcacagaagggattatcggccatggagatgtgaccacctttatttacaagccgacacagccactctctaccatgaaacgccatctcataatcatcccgccccatgcggagaaagaagcgggcttcacacaatgggtagaaaaaatagggcacgttgtacaaaacaccggctccaaaactgttttctatggtaccgaagagacattgtcccgattaaaatctctattaaataaacatagtctggaagcagaatacaccctattcacagactgggacgactttctcatcgtcttccgggatgtacagaaaaatgatatcctctggattatcctcagccgcaatcagggagtgtccttccattccggcatgaaccgtatccccggctacctcaacaaatacttccaaaacaacagctttatcctggtctacccgacccaagcccaagttacagagaacagatacttaacttaaaaacaatgaaacaaaacatgacccgcatgccagaaaaattctacacatctatattcacattggtacggatgaagtccaatttagtaatccccgatttgttccggaacaaacagcaagcttaattctggaatttcaaaactacagccgctcagaaagcgatcttccccctctaccgggcacttgggattacaaaggcagccgtgcatggctcaatggtcaggaaatacttccccccttatggcaaggcaaccattcggttcgaagtaacgaaatacccttaaccaacgaaaacagctcctcacgaccgcccattaccaccaccttgcaaaaaggctggaacagactattgctaaaactacccatcggcaccttcacttccccgggagtgcggttagtaaaatggatgtttacagctgttttcgtcaccccagacggaaccgaagccctggaagacatcatctactcccctcgtctgccggaatcaagcaattcccagcagttcaatttcaaaaaccaacgttgaaccaccgggaataccgggctgtgaaaatttgccataccccaattctgaaggaatataaatctcccatttgtcgccgacacacatatgctgcatggcaataatccatccatcaatcaattcattcaaacggaacgctatcggagctccaccccggctactgtcaaacttctttccgttaattgtccagccggtataatgagctgtcacaacactacgcggagaaggatgtttcccatcatttttaccggcagctatcaccttgtaataaattcccttaggcagagatttaactccttcttcctttgctttcgcttccaaccaatccttattggcttgaaaatatgcttgcttgttcataatttatcaatcttatattagttttttccccaaccgaaacaatacagagatctgttcatcttctgttccttcattttcaatccagaacccagcttctgtaacctcaaaatggataaactttgtttggctctcattttgaactttaatcgcttttataggacggaaatttccatcttcttgaagaagcacatccatttcgtcagaatcatagaacagcatatcatgaccttcttcaaactcttgatagctatcccattccatattcattgctttgtctgttatcgtaaggataaaggtttcattttcaacccgaggcagaacaatgtttatccgatgagccggtggcaaatcattttcatccaagtcatattcaaaaagattcaactttcctttcacatcacaaatgggctcgtcaaaaacgtatgcgttttccaattgccattgttggcagttttcttctgcccatagcgattggctatctgtcgtaacacccaccacatctacataatcgatgatggcagatgttggtaattcctccaccggtggaatccagccatagtccactgcattcaacaatttacctgccaaaaaagggccggctttcttaacccatgatttaggtaatttggcagatgatgcatgaatcaaaattctacaagggacttgtgctggttgccaagtcctattttcaatgtctttcatcccgctacaaataagggatgcccatggttgtcttacagatagtgttttcataaattatttgttagtcctattaattgaaatataaaaataacaatttgtaaattgccaaagttgtatcaattccggctttccagatagcaatatggttacttggttattgcgttgtacaattcctgataagtctttaccacgctgtagactacctcaccagtactgattgttgcaaaatgacgacgggcgcattcaatcttagcatcttcggaacctcgcagctgagatacttcaatatcattgccttttgtttctgctacaaagtaaacatgtttcacactaccttcacgaaaagcaacagcccaatccggattgtacttgcccattggggtgttgatatagaatccgtttggtaatttggtatataccaccacatcatcctcctgttccaatgattcagcaaacgatttttcgatgccttcactatctactactaccaaatcatacaatgatttttcgctttcaatggcgttcttacccaaaacaccacgcagggttgcctcctcaaaaatattcgactcaaatgcatgctcccgtttttcatacttaatatgctgaatcaaggaaagtgccttgcagtcgttgatgatacgtccggtcttgatgataaactcttccggattaagcttaaactgaaggaacttggctggttctattttctgaaggatcgtaacaattgtacgacgggtcaaaccggttatttgcaccagttcaccaattaaatcgtacttcactccgcttccaactgcttcattgacatgaatggttctcacctttgcagaagacatagcaacaccggcttccagctcttctttatcacgaatactgtccatcgaacctctttccaccacaatgcggatttctgaaacgttcaagtggtcattgatttccttgactgccttgtcaatcagcttggcggtatcgaagttcacctgatagtaggtgcgcacattgatgcgcttccacaattcctgccattccttcttctggaagttggtcggattaaaattagcttccttctttctgttaccgttttcgggtttgtagtcatccggattaaacaccttgtcaagttgcttcagaataaatgacttcatcccattcatttcgccaaaatccaactcacccttctttttttcatcaaaaaacttccgggtcagtttaccttgtttgacataaccttgtgctatcagttcctcatgaatattcaccgcttgctgcgtagtcaccttaatctgaagaccatcctctgtttgtgtagtcatttctgcaaacaaagtagctgtaatcaccaccggacgactatcgcaagcttctgctatttccgtctgtagtttcttagcaaagtcatcatagctttcactggcaatgaccgtcaatatattagtatcaaacactgcatctcctaatacgtccgtatcctgacgctcccccttggcattcacgcaaagacgcattccacgtccaacctcctgacgtttcttgatttcattggaggtatctttcaatgtacaaatctggaaaacattgggattatcccaaccttccttcaaagccgagtgagaaaagatgaaacgcactgggcaatccagactcaacagacgttccttatccttcataatcaaattaaagccacgctcttcattctcgccttccttgtttttagagtccacacagactccctttttgtctatggaaaaataaccatcatgaatattatcacacgaattgcgaggatctgacaaaaaacgtgtatagtctccatccgcaaaggtaggcatcatttcctgcaaggcacggtgatattcctcctcaaaaatttgagcatactttcccttctctacaccatccttatcatagatacgataattctctacatgatcaataaagaacaaagacaacaccttgatatgtttgggaaataagtgccgctccctttccaaatgtaccttaatggtttcacgaatctgcatgcgacgtaccaaatcctcattggccgcacctaccatttcaccctcctgcaatgttaaaccattcaagaaatgaatcgtccctgtaagaccatctatgcggtccaccacataattatcatcgtattcgtgcagaccgccgctctgttctttcaaattgaaatgttcatcaaccattcgtaaaacctgctttgttccattggcagctttcatctcaaaaccaatgcgggctcgcggatttcctttgctaataataatctcatccaaataaacgtaaccgttcgttgcagtagaacccacctgatgtacccctcgaacttcaactttcttcactagtttcttattgaaggcatcaatggcatcgagacggaacacaaggttatagatatcatctttgcggtgcgtagcactgtaaagcaccttgaacaacggatgaaagagttctatacctttacgggtggcattcttcttatccgttcccaatacactctgcggctcatcaataatcataataggatttgtcttagccaaaatatcaataggccgacgagagccaaattcatctcgacgtgaaaaaataatacgggctgcagcatctccactgcgaccttctatattcttctcttcattcagcgaagcattgaatgcctgggtgttgatgaccattacatggataccattatcctgcgcaaaaccgtcaattttggaaagctgcttggaattatagataaagtactgcatgcgcttaccatactccgtagcaaagtgctccgccatgctttcaaaactcttgtacacgccttcacggatggcaatgctgggcactacgatgatgaacttcgaccacccatagaggcggttcaattcaaacatcgtcttgatataggtataggtcttacctgtacccgtttccatttcaaccgtaagcgtcaagccttctccctgcaattgttctaccggtttcaagccctgcgccatctgaatggagcggacattgtcgcaaaggctgtcgcggctcaaggctatcggagcgtttccgaacccctccacttcatacataccccggtttgtcccttggtccaccaagaagttgctcaaaccatcgctcttaggttgccctaagaagacatccgtcacgcatttggccgcttcggcctgaaagcgttgatgtttatatttgattttcattgtcgccataaatcagttcttgtaattctttctgggtgggcaaataagtcatatattgagcggcaaaaatctgcttttcgtcttgaggcaacgtatatttcactacagcatcattcttttctgcacagagtacaatccccactggaggattatcacccggattcatcaattcacgtgtgtaataattcacatacatctgcatttgccccaagtcttgatgagtaagagtgtcaatcttcaaatcaatcaacacataacatcgtgccaaaatattataaaacacaaggtcgatgtaaaaatgttgtccatctaacgtaatgcgtttttggcgagccacaaaactgtagccacgccctaactccaacaagaagtgttgcaacttgctgataagcatttgctccaaatcaccctccagaaaatgttctccctgcttgatacccaaaaattccaaaatgaaagggtctctgataatctcacggggtgtccatgttttagaggcggatgtttgtatctcagctttcactgtttctttgtcacggctggcaagcatacgttcgtaaaacatcgtgttgatttggcgttgaagttggcgtacactccaattttctgctacgcattcagacatataatactttcgggctgcctcattttccactcggattaaatgcctgtaatgcgaccaactcaatttatcacacactgtgtggcgaattggataatacaaataaaactgcctcatatagcgaatgtttgtggtagaaaagccaccgccatattctgccgtcaaacgtttggagaggcggtcgataattccctttccatattcagctttcacatttcctgcctgctcgtattctacaatgtatttaccaacttgccaataggcttccacagtgacagaattcaccgtttgagctatttgtcgtcgcgccttatccagcatctgtttgatttgtgcaaacagatgctcttcgttattacattgcgatgtcagtgattcttttttttccatattatcctccctatttatctattatagtaatgggtcatatagaattttctatccgaagcagttgttcgaaatttccgaacagctgaatattccagcctcacatctatcttagtgaggccatccgcacccgtatagatcagtatcttattgttttgctcttccatttcattctttttaaatcactttgatattcttgaaggcctcatcgtctccccaatccagcaactgcttgaacttttcgtagatattgattttctggacatcgtcggtgaaacaggagtcgcggaacaggatgcgcaacggcatcttatcggctattgtttgaatcaccttgtcggtaataggctctgagaagcaagccaccaagtcgccttcattcaccgtataaaccgtacagccatctacttgctccgaagtcatcggcatatccaactgaactccccaggccaacatggaaccaaaaagcaaatccaaatctgttctatctgccttgatgttatctgcaaacagactcagcatatcttgatcgtattctttaggtgacttctttacttccaaatagttgctttcgtccaagcggaagacgcggaaaccggtgtcgaggtcctgagtcgtcaaaggtgattcttccttgattttctttccagcacgacggatgcgttcttttcctatctctggaatcgtatcataatcttgattttttttggtgtcacttacttcttcaggtaactgcaccattataaatcgacaatgtgagtctttctctgcgttggttttcattaaagcatgtgctgtggaggctgaacctgaaaagaaatccaaaacgattgagtcgtcattcaaattggccagtgtaatcaagcgctgcatcaatcttacaggctttggcccatcaaatacccccttatcaccaaataatgcaaccacttcttgagccccttcttggctatgacccacttctttataaaagagtatagacgtaggagccataccttcatattttaattctgtaagaaatcttttaatagatggcacactatttccgtctccaccaaaccagatacggttgtcttggagtctctctgcgaaagcttttgcagagagcctccagcagcgtcctgctggaggctctactatacgtccagagggtgtcgttatagaataatcacaatctgcattataagttttaacggacatatcactcggtttccaaacacctctaggatcattgtctggattagaataacgtgcatttgcttcttctgtacgaggcagacgtccaattgtaaaattatctagagatttggcatacatgacaatatagtcatgactgcttgatatgtattttgcatcatttttaggtgaataagctctttcccatactaatgtagagagataattaccctctccaaacacctcatcacagatattacgcaaatttcgaacctcattatcatcaatcgaaataaaaatcaccccatcctccgtcagcagcgaccgagccaccagcagacgggaataaatcatcgagcaccaatccgaatgaaacttaccattcgtgtctgtattcttccgataacgcaagcccaattcgttcacattccctgctttcaagtcctcttcggcagccgtgcgagcaaagtcatcattatacacaaaatcgttgcctgtattataaggagggtcgatgtaaatcatcttcaccttacccaaatacgagcgctgaagtaatttcagcacttccaaattgtccccttcaatataaagattcttagtgttgtcccaatccaccgaatcctctattaccgggcgcagagtcttgtccgtaggccgatccgcttctgctttggctgctcgtttgcccacccacgtaaactggtagctttcgcccccttcttctttaatggtatcccctagcaaggcacgcaaagcgtcgaaatctaccttacgagtggtttcgcccgtcttaggatcacgcacctcagtaaatacagaaggagccaactgatagagggcctccaaattcaactgcgtactcgaagctgaacgcatatccaagtgatctattttatctgaacccataattatatcaaaaatatatatatgttttattcttcattgttttattcttctgtatctttgagctggatgattaggcatattctgttctctttccaacagtcctctttctatcatttggggaataatttcacccttaagatattgtacactgcgccctatttcttttgatagctcgagtacagatttccaatctgttgaacagtcacaaatgatatcaaacagttcctgtttactatatctccttttctctttttctacattagtttgaagaacctcagctgaagaactgttaaggttactgttaaggttactgttaaggttgctatgcgaactattaagattttgtttcatgtttaaatgataagttgtacctctgcctataccttcagccactagatatccatcctgacacaattccttcaacattcttgcaatatcatatttgtgaagattaagcgtatatcttaaacgctcgtttgatacaagcccctctgttaaggccaatgacaaagtaagaagcctatcatgttccagatagagaactttttctccaaaattttctaatagctcttcctttaccttatcatctaatatcgagattaagggcatttttaagactactttatccggtctgtatttctcttctatattaggtgaattccaattcgattttttccaaccggatataattatatcagcaccgcttccagctttttcagcttttcctagcatcatgaacattttttgcaacgataaattccggcacacactatctcctccttcgtagaattgtttcttcgataccaacatacaaccgggattcgaaaacatcaattcacttttacttctcgtaattacagtagatgcatttatagaataatccgcatgaaccaatgtgtttatcaatgcttctcttacagcaatgtgcgcaggtgtttcatcctttcttgtatcgccttccaactgaaatggtacaggtagcatctcctgcaatttaggaagtacacgtctatagaattgaaaaatattagcctcccatgtaccatccggacaaatacgatctaaccatctagtcgtggtagtatcttctcccaattcacgataatcaagaaagaaattaggagcgcacgtctcgtaggttatagagtctgtttttccaaacataagcaatccggctaatgtaaaaccctccttaccagtttgtctgtcaatcttgtaacctcccaatttcttgagtagagccaaatcgtctaaagctaaccaagcatgccccggcttagccaagtcaaacaatcttctgtattgatcaagtataatccgcaaatcgaaatgttcgcgcattttaaaacgaaaagttcatttcacaaaacgaaatgtataaattgaagcactctttatcccatttgagcaggtcatccataagctaaaaataacagataaatcacttgcaaatatcagcaaaaatcactatctttacatagttaaattgaggttgtttaccccaaaatcagtttagttttgtattcccctaccctatcaatattctaaaaaaaatcgaccggcttcgccggtatttgaataccttttaaacgggattcggaaaccatccgaatcccgttctttcgttttagtcgcttcgctccacgctttggcgctttgcgcttacgccacctcgcgtatcgccttatacgctgccacgctttgcgcccgcacgattttgccgcggaaggccagacgcgagccgacatacgcgctcgcatacgaagcatcgttattcgcattcgcatacgatacaccgccatccgcgtacgcactgtagtacccgcgatagaccacacggactgtggcggtgcttatccagtatatgtcggtatagtaggtagaagatgatccgttcaaattacctaccggaaccatgtccatatacttgccgtgcgccacgcctgtaatccactggccgctgtccttcttgccctgcaccatgcggatactgccgtcaggcatccagatgcgccatttgcccacgttgccgctgtcgttcggcagatccacgccgtccatcatgtcatacttgttgccgtagatgtcctcatagcccaggcagcagatattgttcacctgcaccacagtcgcctgtccgtattcgtcacggctcttataccaggcaaactggtgcaccagatcttcaatcagcgaattcgtgattttgttgttgatggcatacgcttcatcgtagccgatggtgtctgtcatcccgtgttctgccgttccacccgttgtccggttattgttatgctgaccggcaccgcattgttcctgcatgtccctacgcccgtactttgcatagctcaggttcgcgatgcggctgtgcatcagcgagtctatctgctgcatgccacgctgctggctgtaatagtggaagtccgtccacgtcatgctggcagtggtcgagccgccggttatgcaggcacgcaacttgctgcccaccacagaactgcccacaacggcacacagatgctcctcattggccacccaatccggttccatgtcctctatcttgtcgctgttgctcagtaccacatggtcaaactcagccgtgttcaggatggagaaatgcagagccgtcgcacgatccggaacgtctgctatcagatacatgccggcttcaaatttcaaaccgatggtcggcaccacgatgctcttcaggatgtttcctgcagcatccacaaacacactgccgataagccccgtgccgggaacgctcggaaagcggacacgtctgtagccggatacatccaccttacataccgaataggccttgtcagtcgtataggattccatcaacgtaggctttccgctcatgatcttgcgttcacccagccatccgccctgcgtttccttgatgtcatccagcgtcagtatagttgcctccggaacaggaggcatttcgtcctccgggtagctgctgtagcaggcgtacttcttgttgttcagataatcgttgatacccttgctccagtagaacggttcatacatcatccagtcaccctcgctgccgtccagcttcgccaccgtgcagtcgttcatatcctccgcatcggcatagaagttcgagctttcgtcatgcagggggaaataggtcatctccccgtccgggttgttcacatccacctgctgtccggctatctccactttccggctcgtaggcatcctggtcaccttggccaatacgcggtggcgcttggacaggatggcattcacatgcccgctcattttgtacgcattcccgaacttgtatccggtcttgttgtccaggtttgaaatattggcatcgtcggccacgctgtcgtcaaactcgatcatcgtatagggcggctgcttgatggtcagttccggataacgggcggcatacttctccagttcctcatcagccagatacttcgtcagggtcagcttgcccctcagtcccgaatgccggtcatccacggcacccgtctgcgtatacgttccgtagtcgtaatacttcttcagcagggttccgtcgtcttcccgatctatctccagcacaaagcgctccagcttgccgctgccgttctgcttcgcctggtgaagacgttccagcatggcaaacccgtcaatgccggggcagttggtgtagcggtagccccgcacattattgatgccttccagtatcaggccactgtcggacagcttggtcagatattccaggaacagttcctcaatcgtgtccggcaggcataactgcacaacgggcgcaccggtggccagtttcacgcgggtcagtcccgtacctcttacgtccagtttcttcagccgcccctgccagctcaaatccaaggtggccacgtttccgttgtccccgttccgggcaagcaggttattccgcatgttcacttcttccagaagcagcatcccgttcgtcgaggccatgaacgagccgttccggtatccgctggctttctccacgctcatgtccagttttaccagtgaggtcagcagaccgaagttgaacccgatggcgaacgcatcttcatgccacaccagttccttgattttggctgcaccgataatcttcagcgggtcattttcgccgaacgaacgggtcagctgcagggaatggagcacgtctgcatccaccacaccgctgtcggcctgtacgccattgctggtagataactgcacacggtacgggatggtcagtcggtactgcatcggtttcagtttataagccttgtccagcgatgccgtactctggtagaactgggcacccagcgtagatacatagccgtactccacctgcttcaggtcgtaccggcgctgaatgaaatagttccggtgcgctttcagcgaacccttcagaccgtagatctgcggataggtctgtttcgcaccgtccgcgcccaccggcatttcgttcaggaacgggtagatgtatttgaagataccggacttgttgtacaggcgtgagcaccacttcttcatctgttcggtgtcaaaatggtcaacggccttctgaatactgaaggcgctcatgaagctggtaccgccgttcacgcccttggtcatcacttcctccagcagattgcccatgttgcccagtatcaggttccacagccagctgttgtgtccctgcatcacgtaggcaccgtcgcgcttcgtctgccggttgtcgtcatacttcccggtcaggaacgacttgttgtccgaacccagctggcagtccccgtcgtaataggttatccaccacatcacaccgtcccacgtccgcaccagcatgttttttgccagctggtccacgcccaggttgaactgcacatacaggtagtaggcagccaggttgggcaggttgaaatacttcccggcttccttcctgaaggtcgggctcacccatttcgcagtcgggaacctgttgccatcatcctcatagtccaccccgtcaaacgtgtgcgactccctgttataggtcagattcttgccggcaggcgtttccttcacgcatctgtacaggaagcccatcatgcggtccagggccttgtacatcttgtcatatttgtcaccggtgcccaagtgttccttgatgttcggttcttcttcggcatcgccaccgccgtcgttccagaacacgtctttcgggtggttgaactcgaaaccgccgtcaaagttgaaatccatgaagtccgtatggtcgggttccgtggacggcagccaccggaacaggcacaggtcattcgagttgttcagcgtctcgatgcagatgggcaggtattccttcggctggtcgccgtttgcctgcaggtagttcagggtgtcgccggttccccactgctcgccgccgatagtcttgtcctggccgaatatcggataggagtcggacttctcgttgttcatgttatactggccgtaataggtcagatcctcatccacactcctggccacaaacaggtcacagggcaagccgtcaatggccgagcgtatatcttccttgcacgtatctgcatggtcggcggcatactgttgggcaggggtcagaatgcccatttccttcatgccgtcatgaatgaacttcgcaccgcccgtgttggtcgtcatggaggagtctgaaaagtcacatttcgcacaggcaagttttgcgcccaccgagttgccccgcagccggaacaggttcttcttgccctccgtagctgtcgggttgctctgctgcccgttgccgtctatctcgccgtaggtcatccgtgccgtgtaaccgctggctgtcttctggaagtagaagcgcaggttcttgcgggcatagttcaccgagctggtaccctgaatacgcagataaatgtcacgggctatccagtccagcgcccggttctcgccgttgtagaatctcacttcccggcacagcttgttggccttcttgttgttcagctgggccagcgcatccatcacgttcagcgtgtcgctctcgctcggcacctcactgcccacgctgcccgtacctatcagtaccaggatcgagttccggcgtttcttcatcagtcccatcagcttctccatgctcaccgtgtccccctcgttcagcacgcggttgtcctcatccagcgaccgcacgcccggctccccgtcggcatcctccaggtggttgcggtccacgatgtagttgttcagcacctcgtccgaggtcagcgccttgttatatatgcgcacgctcttcacgttcaggtcggcacccgttgacttgaactccagctggctctggatgttgaagttcaccttgtccagccatttggaagctgccgattcttcaccgttcacataaaagccgatcagcgtgcgctgttcgttcgtctgcacgttcgggtagaacacgtaggtaatgcggatgttcgtaccaggctggaatttcgtacccaccgagtcctcatagcgcagcacctgcccagcatccatcgcctcggtcaccacaccggtcaggaacttggcctcttccggggtcacaatcagcccgtaccggttgccgttgtccagctgtcccaggcaagtaatcagttccgcgttcgtgtccgtcacgttcgccgtgctgtattctatttccagcgtcatgcccacgtcacggatggcaaatccctcgggtttgtccgcctcgttgaagggacgataaccgccgtcggcggtcagggtcatgcctgcaccgccggccagcagcaggcggtccttgtgccagccgctacctgccccgtattcgttcacgctccacagcacgtcccggaactccatccgcttgtcaccgctcacccagcttgccgggttgttttccgtgttgctgcgcccgaaggcgtcaaacgtacacacggcatccggtgccagcgtagcttcaatgtcggggtgcgatgtcgtgttcaccttcacctcaagcacggcatcaccgcacgacacgcggtagtccagcggttccacatttacgttcgtccgcccgtagcttccggtatcaccgcgctgcagcaggtcttccttcaccacactgccctggttcgttactttcacgcgggccgtgtacgcatcgcggtcataaccggcatacgaaaaactccatgccgtgaactgctctgcctccagcaccgggcgtttccagtcgcgctggaaccctgccgcacggtggctgaacatcatgccggcataggccgtcacaccgccgcctgccttcagcagcgtaatgtaatgcacctggctcaccacaccggagttctcatgctgtgcgtaggcttccaccacgttcgtcccttcctgcatctgggtcagcgggatggtcacgttcttctgctgcacaccgctgccggccgaaaggccaagggtaaaggcctgtccgccgttcacacggtagtagatgttcttttcgccgctcgtacccttggctgtaaaggggatgttcacgtcgttccggtatccgccgtcggccagcccgttgcccaccgagtaggtcgtctccagcgtcatggccaccatggtcaccttggccgtggctgtcttcatcagcgtgccgccctggtaggtagcctgcgcctccacctgcacggtataggcggtggcatccttcaggtagggcgatgcgtcaaaggtgtagctctgtccggctgtcacacccacaaattccgcatcctgaaactcactgatcacggtcgaaccgcgtttcacaatcacgcgggctttcaggtcgctgtagccgtccaccgtaccgccaccggcagtaccaacgcccacggagtatttcaccacaaagccgcttcccagtgccaggtactgctgcgagggaagtcccgccccgccgctgtccgtcaggtcaatgttcaccaccaccttgtcgtcgtcggtgtacttcgagaagcgcacctccttcgagctctcgccgccctggttgtccttctgcttcacggtcatcacatactgggtgccgtcctcgctgtcctgcacatccacgtccgtcaccgtacccaccatcgcatcgaacaccgttccggatgtagggggtttcgtctcgccgcccaccagttcctcggtaggggtacggtttgacagttccttcttcagaaacgcttcgacatcgtccccggcataggcatgataggtgccgtccggctgtttctggttccacggtgtttcaagattcatcggatgttcagtcgcattgatgattccgcttattttcctttttgccataatactgtccttttataataatcattcatttatcagttttactgctaccgttccatgcgtccgacccgttccacggctcgtcgcctttccagtatccaagtccgaaacagctgctgattgcggaccataccagccttgccccggcatagacagccgacagggcacgttttcccacatacgcagccgttatttccttaccgcctatggttatcatcgtcaatcctcctcataaatcagatacagcgtattcgcatccttgtccggcagtgcttcgtaagcatccccgctcatcacctcatgccggtaggccagcagtctcaggcggccttctgttccggtatatacggcatcgcccaataggtaaagcttgtccggcaatatgcctgaccggtccgcactcatgaacatgccggcaggggacacacccgccacgtcccagtccccgtacagggtggagtccatgtggtaggcgaatttcccggcaccggccacatacaccacgctgccacccggcttggtacacttgtcaggtaaaacgtttccggtttccatccatgaggaaaagcgtgcggtagctccgccgacggctgctgccgtagtctgttccaccttggctgcggcattttctgccttggctgccgcttcgttggccttggttgcggcttccgtggcggcctgggtcttttcctccagtccggctacggctccttccgctttcttggcggcagcctcggcacgggcggcggcatcgctcgcaggcttccctatcagctccagaggtacgttcaccatctttccgtccttctcgccgggcagtgatttcacaccgttcagcgaggtaacagtttccaaatcctccacaccggtagaggactggagcacacggtccagcacttcctgaaccagttcttcttgcgtcatttctgccataaatctattcatctatcaattttacgatctgtgaataacatcctggggttagcccgattacagactcttttataagtatagcatcctcagcactgatggataaatccccgtttgcctgtatgagacgcatgcacaattcatacgaatggattttacggctgctatccttattagaatcaccggatgatcgagcaccttccccattaaaaaggcattgggctataatatctgtcattagctggacttttccaccgactatgaggtcattccccctataatccttaaacgtcttgttaaaattcaccttcataactattcatttttatgacacgttaatgataattccattctgtacttctactgtttttcctttgaatcgcccagaccagccattttgaggaagcattttatcagcttgtaccacacccccactcaccataatgtttccggaatgcaccaacacatcgccatcgaaatatcctgctgaaaatgtaaatttgtcagggtaagtaggcttatcacggcaacttccataaataccggctccaccaaatggagcaatacccatgattgcattgctaaaattgtttgccttggcatatatgcaggtatctccggtccaatagccgtcataccccaatcgaatttcagcatccccgttgctccaaagcatgcaattcctttcaactgtaaatgttcctacctttcctccgtcttcaacaaatatttttccatatacagatgcattccggcattccatgctgccgtcttccagtattttaaagtttccattagccgttaccaatccctccaactgtatatggtcggcagtcagtttgattttgctcacggtatttccatactcatcctcttcctccacgcttaccccgataagggcaatctttcctgtattgtcctgcgcatacagaccggaaccttcaggctttataacaaggcctgtttcttttagcgcattaccatctttatcaaagaccgctgccgaaatcttcaccagccggtcgctctgctcgaacagtgtcctgtacttataggccagtgcgtctgccttgttggtagagaataccagcagtgatatgtaaatcacgcccgtaaacgacagcttgaagtcgcctgttccgttccatagaccatccagcgtgaacatcttctcaccgcccacgggcaggtcttcttcatggccgaacaggttgaagttctcaaatccggtcttgtcagcgttcacaaattcgattttcagccttccggctttgataactcggtaactgaacgacagatacaccacgccaggcacccgttcgccctggctgttcgtctgccggtactccggtaccagccggaagtcctccagtttctgcatgatataactgttccggatataggcataaggcaccttgccgtcagttcgtatctcggcatgtccgtccggcttcgttccgtaaggaccgccgttcgcccaaatccagcgtccgcccagcgtgaacagcgtagccttgctgcccgtcttccatttgtccatgccgtcggcaaaactgctgttgtccaaatagctctgttcttcgcgtatctccttgcgcaagctttctacagccgaatggattttcccctcggttatctcaaaccgcgtcaggatgtcctcaccggtcatcagcacaaacgtacccttcagccacacgttgtcagcatacaggccgtttcccttcggttggttgtctgccggaaaagcgctgctcctgatgccgtccagcttgcccagccggcagcgcaggcagccgttgaagttcttggccttcaccccatccaggatgtcgatacggggctgtccgtcctccgtggccgcaatggatataaggttctgccggagcgggttttcggtgttgcccatcagcacgcactcatcgcctgcctccggcttcaccccgccaaactcgctaaccggaaccatcaccccgccggctatcaccgaggccacctccacccagtaggatttcagctttgccccgcctgtaacggcacagcgcatcaggtcatgggccacaaagcccgattcctgctcaaacacgatgcggtagttgtcgccctgcttcaccacgtccttgatcttgccgttggcggctgacaccaccaactggccgcacacgctgcgcacctgctcaatcagcagttccagcgccaccaggctctgccgggcagtcactttgtccaccgtcaggttcgtcagtcccgtcagctggtcaatccacagctgccagccctcaccggtcagcccgtccacaaactccgtgctgcgcagcagttcgcggatcacggcagtcaggtactcggcattgccctcaccgtccacgctgccgcagggtttgccgccggcagcctcgccaaaggtcacacccttcaggaagcggatgggctctttggctgtgtccggctggttcttgctcagaaactctttctggctgcgccgggcggaaaacaggttgttgtccgtgggcagcgtcttgtcccagcttcgtatgatgtccggaagggcagcgccatccgtctttgattttgtatagcttttcaacgcaccgatgctgtccgtcaccttgtcgaacttgcccacctgcagcgcatcgcttatctcgatgtccatctgcccgggttcgttcaccttgcggctgattttggtgatacggctctgccggtagcctttttccgggaaatacttccggctctccagcttcacccgtctgcccacaaacaggtcaatgccgtgctcctccatgtacaccgggtctgtcggagctttgtaggcggcaatgtccagccagtggtcttggttatattcctctaccgctaccgcaaactcctcttcggccagccggtaatactcatccggcatccggatgttccacagaatataggtgtcgcctgctcggggcaccagcttgccgcccggcagctgggtgccgtcatcgtagggccagatggtaatcagttcaaattccctcgccgcactgtcgtagttcacctcaaagtagtggtcatcgctttctcccagtccggccaggtcgcccgtctggaacgacacgcgcttggtctcgccggccagctcgtacaggttggggtcaaagttcagccccccgtcccggaagtaataaatggtgaatttcttcccttcatcgtccgtcacctcctcgctgcgtaccgagctcaccgtaccgacccgacgggggaagatgccgctgaaggcatcctgctcgtaatggtcatagatgccgtattcatccacgccctgctcgatgtacttctttccgccgggaagcatcagacgggggctgccatatttctccgcatcgatgttgcgggtcgaacctaccgggaacaggcgggtgtagaacttggccgtgttgctcgtgtctctttccagcgaggtcagccccttgccgtaccccagggcaatttcttccccgtgttcgcagcggcacacgttcaccgtctgcccctcaatccaccattccaccttgccgccggccttttccgcgatggctttcagtgcttcgtcgcagtacataccctcgtagtctatcgtgatcagctccgcaccttccaccgtacccaccttccagtcggtaatgtggcccatgccgtcattgatggctttcaccaccagcgccacatgctcacggggcgtggccgtcagggtaaacagggggttcgtgtccccgtccgtcgtctccagcaccaggaaccgcttgatcaggctctccacgccgtacagcttcaggtcatagtcccactcaccatcgttcacctgcttcggcgtgtagcgttccgtcagccagtaccgttcacccagatagtccgtgtagtcgttcacgtccagaggcaggaagtcataatagctgaacgacagggaaagcacattgtcaccctgcacctccttgctttgcgtcgagctgtcattcacagccacgtccgcacgcttggtcccggctttgtcatatatcgttagaagcatattctaatagcgtttgaattgtcgtgcaagcgagtgtcaaagagcttgctcgatttgaccgagcgcagccgacaatcagcttgctgaatggttatataatcggtttcggttcccggaactttacccggaactttccggcatgcacgccttccgtccacagataggtcagcggggtgaacttcgtgcagtcggcatacttcacccgcagctgcagatccagctgggggaaacggatctccagccagccgtccttcccttgcttcaggaaattcacaaaggcaaagtactgcttcatccagcctgcctgggtcttgttgtacagcgcaaagtgcagcgtcacgtcccgcgcctcattccgtggggtcagcacggggttgtatttttccccgtgctcttcccgtatgtccacagccgtatccttcttggccttgctcggggtcaggatggccgtcaggttctccatgcccccgcgccggtcttccaccaggaacacgccgtattccgtccagatgtccgtgccgttcaccagcaccagtccgctcagtatattgcccatatcacttcacttttagtccgtcacgtatcattttctttatcacttccttcagctcgcccaggtggccggcgctcacaccggtattctcggctatccgggccaggtgcccttcggccgtgtccatcttttccgccacactttccagccggtcgtccatgctgctccagtgctgcagcccgccggtgaacatgccctccagcttcgtcccctggtcctgcgtcatggccgtaaagccgcccgctttcgcactctggctggtaccgtcggcttcggtcttgtcgtagcccgtggctgccgccaggttgtcacgcagggcaagggcttcgtcaacatactgcatgtactcttcggtcagcgcgttccgttccgcctcggtcagttcgttgtcctccatggccttgccgaacttctcccaccagcctttcagtttttcgctgtacatctcaccgatcttgttgcttagcatcgcccgcatgaagtactcggatatatcctctgcagcatccttcgcgccatacttcatgttcatcagattatcgatgaagctgctatacattccgtcaaacgaaatgcccgtcagcccttcatacagctggtcggtcagttcctccagcttgccggcctgcgctatgtagtcatccagtttctcggtcagtcgcccgccgtaaccgcccttgccggtgttctgtatctgcgtccacatgtccacgttgctgcgcagcgccttcatctcctccgggctcaggctccacaggttcccgtcccactgtcggccaatctgtccgctcagtttgtctatctgtgcctggctgaagccgccccagtagtagttccagctgtggtgacttccgctgtagcgtgcctgttccttcgctatctgcagatagtttgcattcgtttctttctggtatttgtaagcatcccggtaagcttccaccgatttagtccccttgctcgccttgatggtatcggtcaagtcctcgatggaggtctgcagtttctcgttccggtccgtaagacggtctatagccgcctgcacttccttggcgtttccgccgatgccgaacagcttgttgaaacctccgaaagacaccgtgttcagcagtcctccgattcctttcacaagtgaaccgcctatctgtttgaacaggtccccgctgaggatattgtcgagtattccggttatcgcattgaaaatggtgtctatcaatgatgaaataatcgggccaataccgtctttcagcaaatccagtatggacagaatggccgatatgatctgcccgatgactccggcacttgacagggtctcggacatctgactgatggcatcaccgaccttgcctccgatattcagttttgaaagaccggtaagcatgttctggattccttcaaatgatccctgcaaggttccgctcgcaaagccgtgcaacccgttggataccatgttcaacccgtcaaccgtgtcctgggaggcacttttcacctccccggcaagcgccttcatttcagaggtggcgttcaggtattcttcgtcagctgaagcgctggacgattgggccatttgaagagcgattttggtacgttctatttctgcctggttaccgctttcaagagccttgttgtaatcggtctgcgctgcttttaaccgggcgaatgccgcttcctgctgcagttccgcattttgcacgcgtgttacggcattccccaaagcgtgcatctgcgtttgcagccgggcaaaatccaatgtgccgttgccaccggggagcatgctttgaatacgttcaatggcatcgtaaacaacctgctggtccgctgctcctgattttttgaactcatccgtcttgacatactgcttaagttcgccgagcaggttcttcatctggtctgcaagcagaccggtcaaatccccgaacgctgctccccagtctatcttctgggtaagggcttccatgtccactttgtgcacagccgcatcacgctgcttctccaaagtcagcctttcgccctgggactgtgccttgcggattttctcggcatattcttcagcgatggccagtttctgctgctggaaggtaccgtattccttcagatagtcacgcatggcttccgcctcttccctgtacacgtccgtctccgcttttttccgggactcggtgtttgaggcacgggctttttcaagtgcatcctgttgctcacgggtaagtccgttatctccggtggatatgccggcttccttgttctcacgcttccagtcggcttcctgccggttaatttcttcttttctcgcgttatagtcatattcgatttgtgccagtttcttttcggtaccggcttgcatgcggtctatctcttccttccggttctcggcctgcagggcggcaagatccttcgccagcctgcgctctgtggccagccgttgcttggcttccgcttccggattcttcccggactgttcggggtcggtatgtccgccgatatttccttttttggctgcttctgcggctttccttacctcttcctccgcttttttcagataaccgtcgcgtttgttttcggcatttttcaacagtatgtcataagcttcctgatcatgtttcttaatggcagcctgtgcgtcatagaactgcccggattctgccatgcttgactgcatgatatattgtccccatttcccgaaaaagcccatggcgctttccgcctcttccggtttctgcgccttgattttattcacctcttcatcggcttctgcagctttttttacaaggttctggacattggcctggtgcagcagaacctgtacatagtcctcgctcttttggataagggtatcataccattcggaaagtgttttataatacccgaaagattccccgtacttgcggttcagttcctccaccttggccttttcctgttccttgctgccggtgaagttctttatttcattgataaccgatttcagttcaaagcgggtacgcaccatctgggcacgtccgtccttctctatctcggtcatttccttcagcgatatgttgaattcatccacgccttttttggcactgaacaggtttttcgtccaatcccagatttcgtcaccgtacattaccagcagcatgatgccggtggtcatggccgtctgccaggaaaaaagtgaggaaagaacctgcttccataccggtgtgcctttcttgccggacttctgcagctcatcgtattctttccgggcacgggccagttcgtccgtaaaaatcggcaggttgttggatatggccaggaagaacatctgcggtcccatggccaaggaaggcatttcacgcgccatctgctggatgctgttgtgaagaccattgaactgtcgctgtgcattgggtacatctgcaggggtgacctgcacggattccgattcctcctgcagcagtttcaacttgccgcgcaattcatcaagctgcttctccagtgcatggatctgcgcgatattggcactctggtccagatttggggaagccgtctcaccggcaaggcgcagcctttccagttcagcctccaacaatctgacggtattacgcagttccagcgcctcacgctcggctttattcataccgggcgtaaggttatccttcatcaaaaattcaacttctacaggtttgctcattccagtttgctttgaaaaaatcctattatatcgttcgcctcatcctcggcgctgcgctccgggtggcggtcacacttaccgctgcccctcttctgccgcacataccgcggcgcgtcgctcagcatcagtatcagtgtctggtagttcacaccgtccagaatgtagtccacactccagcccgttgccgatgctatctgccacacgaagccgaaagggctatgggaaccctcataccggatccttaactccccatccttgcctggctcagtctcggagtcatcgggttcgcccgcgccgccgagctgataatacgcataaaatccttcgtgcccatcagacgctcgaatgtccggaacatagccgtcagatagcgccactccacaaagttccgaagcacccatgccgtcaccccaatgcctacatgtcgcgacacatagccccggcacaccgtataggccagcagacggctcacagccttgccatgttccgctacaaagcttagttcctcggtcttgtccttcggctgccacccgggttcaacacccatcttcaggtattccctcgccagcagaatctgcccgcgcagtctcggacgcttcatcgtcacacgcacctccaacggacatttcagccacggaagcttccaccttttaagaggaacggacacgccgctgtccagcagcgcatccgcacactccatttctatcagttgttccagccggtcagccatacactatccctccttgcttgtgacctcctcactttgaaccgaggcagccgccgctgctcccgcagcaggcagcttgtgctctccccactcttcgggcagggtttccgagtcaaacacgccgtagggctgcgaaccgtcctccggcatagccacctccaacgtacattctatcttggccgtttccgtaagcgtcagcttaccgcccaggttgctcagcagcgtgccgttcggtatcaggatgctccgtccgctcaccagttccagttcgaaaggaccttgcatcagcagggcggcttgtggagcagtccagcctattgggttcttcttctcgttgtcttctttcgcatagtgcagcgtgccgcccagcatggcatgcaagttcttgtagtccgtctggattacgttgaatgtgggggcgatgctaccgttgctctgcggaatgatcagcacgggggcacccggtgcctgttccgcctcaatctttgcaacttcgggcttctggccgttcaggtcaaacgagcctttttcaatatagcctatcacgaagtcattgtatttcacggcaccgataccgtacataaaattcttgttcatcgtttataaagtttgatggttaataacacaccgaccaataagccggccaatacacctgtgataaacgtccgcatccggttcggaggacgtttttctactgtttgaacgtcattcgaagtttcactattggtctcgtttcggatgcgtgtcagctcttcttcataccacagcaccaactgttgcaggctgtcacacgaggcttcggccacaaggttaccgctaccgtcagtccctacaatcagattggcctgtccgctcttgccacggtacaccgcgccgtcaggaagcttacggaggctgtccgccggtatcgtcagctgcaccgcactcgccggtatccccgccatcaccagtcccgcccgtcggcttacattcgcgctgtcggcgcttgccgattccgtccggacttcccgattcatgctctttcggtgactcgcgcaacctgtcaagcacagggcaatcgtcacgatgaggacagtttccggctgtatcaatggcttttctaagacgggccatctcgcgcgtattgcgggccagttctttctttgtttcacagaattcatcttttagaggttttacaatattttccatcaaaatgcgggtggcatgttcggcattatctatgcgcatagcctctgcgccggcctcggccttcatcgcttccgctttcgcttttctcacagtagcccgcaaggagccaatggtcaccaccgtaccaaccaggccgccgccaaggataatgttcataaattcgctcaagtccataccacccggttttattattgattaatacctatttctttcaaccattcctgcacatcgaaactcggacaggctttcgctgccagttcgttgtgtcctacaatgcgtacatcagggaaactggaatgaaacgcttttacatagcgttccaatgcatccttctgctcctcggtgcgggtatctttcggagtcttaccgtctttttccacgcccccagcatacacgatgtgacggcttacactgttatatcccttggctccgtttgtcacttcccaagggtccacctgtgcatcctcattgttttctaccagacgttccacgcctccgttcaggtggaacaagtcggtatagccaacctgcttccatcctcttcctccctgggcaaccggagaagtatgccatttgcggatgtccgccgatgatacctcacgcccctccggagttgccgtacagtgaattaccagatacttcaattttcccatatcttttatgcttgatagccgctcatcattaccactccggcatcctctttcttgggcatacagatgaagtaatggcggaagttaatcagattacgctgattcaacgggtcgttctttgactcggaataatacatcttggtagaaccggttgccttgaaaacccgctgtttgtagaaggcaaacgaacacgggaattcaccggcttctgccgttgtacccaatgccttcttcatcccagctgtagtataaagcgggttgttgccgtactcatagatttcaaagccataaaggttacctaccttgccgctgttgcggtcaatgttgtactgttcacggaatgcctggctggtcagcagcaggtcattcacatggtcgggacaaagcaccagtcttcgaccgtctgacggtacgcgcaggttgtcaagggcacgcttcatttctacaaggtcattcacggtaaggcgcagacggtttgtagctggatctttctcgccggtagtcttaagcaccggagtggtttccgtatttttgttcgcacaaagcgcatgggctgccttggtgaacttcgcatcattgatgctgttggcatgtccctctttcacacgggcggtcttgtcataactgattgcataaagctcatcgtctgtaatcggcgtggccttggtctggaatttgtccaacttgatggcaatatccttgtcctccaatgcctgcacatcaatcggataggttttgttgttaatcaagacatccggatctacaccaacttctaccagatgaatcacatcgttgttcacgatactgctttggtcggggattcccgccagccaggttccttccagtccggcacgaagcaccttgacaagttcccctgtccagatttccgtataaaccccttcacggagtattgaagcactctgcggggtcattcccataaaggctgccaccgcattcattcccacagctccggccaccggagagaatcccaataccgaagcacacacgacacctgtcagcgtattgaacagaagtgccgtcaaaagcattacaatttttcccattttcttcattttaaaggttttcaaatttcacaggtcatgccgtattcagccttgtacaggcgcttgtactcctctgggttatgctcgcgcatttcaagcagcgcatcactcgggacatcgctcagcttggcataggtggacggctgtgcctgctgcttgccgccctgatagctcaatacagtggaaatcttcacctggggctgcatggcatcaagcacattcttcagttcatcgacaccgaccttcttgccaagttcgataaactgtgtcttcttgtcttctcccagacgcttttccaccactgccttttccacaaggctggtgatacgggccaaagtcagcttcccgttttcttgtttcaaggaatcattctctgccttggctgctttcagttcatttaaggctcgattaacatcagcctccgttgccgtttccggcagccccaattgaagggccaaaagtttcagttccatttcttctgttgttttttggttattaattagtggcaaaggacaatcaccatcctttcccaatgtgatttgttttccatccttcatcagtacgatggcatcatcattggaacctacgtccaccagtgatacctcatacagcttgcttttggttattgtagggctggtctgcccctgcagcaaatgttcgggctggtcactcagttccaaaatgtctattccggcactcaccattctcaggctgccgaattcaaactgtttcttgcatcttttactgaggtcggttgcttcgtcaaacaccagttccccggttacctcaccatcttccacccgaaggtccttcacatagccaatcacgttcccgcgttggtgcatgtacagcagtaccgggtttcgacaatactgctccacactcatgcccgatgtcagcacacggcttccgtagctgttcaggctgtcgtttgatattcttacacgtttactcattttctcatgccacgcctttatgcattggcgctgcaatattacagagcacttaccgggaagccaaaaaagtgtgcaatggttgcacacttctatgaaaccgttgcacattattttggctgcaagctgataagcggacaactttgcgaataaatcgggcaggtgcaaggaactccgaagcctgcctttaaccctatattctttattatatgacaaaggcagaaatcgaaaagaaaaaatctcttgcacgctcactgttcctttccggtatggagcagaccgaaattgcggagaaagtggacgtgtcacgcgtaaccatttcaaaatggtgcacggctgacggatggaaagaagcaagggcggcaaagaacgtcacccgtccggaactggtgaacaaactcctgctcactattgatacactcattactcaagtcaacgaatcaaacgaccctgcacttgtagccggtctcggggacaaactggccaaactttcggcggtgatcgaaaagttagacaagaaggccaatgtagtggatgtcattgaagtgttcatggcattctccaaatggattgaataccgttcaaccatcgacccggaagtgactccggaactggtcagggcaatcaacaagtaccaggatttgtatatcaccgaacagatgggcataaaataaaacggctatggcaacagcagcggaaaagaaacaggcatacgaacagtggaaggaacactgtaaaagagtgcagtccatcacggatacggctttgctcgcgggcgagacaccggcacaaaaggataggcgtattctgcggctgcagggtaactatgccgcgttctgtgagtattactttccccacttcctcaccttgcgtgacaaaaccaccggggaagtcatacgcaccatccacaatgcaccattccacaatgcggcagcggctaaagtaaaaggtacacccaacctgaaggcagtattcatgtggccgcgtggccatgccaagtccacacacatggacatttttgttccgctgtggctgatgttccagcccaagcgcctcatcaacttcatggtggtggtcggcaaaagcgaagattcagccacgcgtctgctgggggatattcaggcagaactggagcataaccagcgcatcattgccgacttcggcaagcagcaggggaatgcctcctggcaggatggggagttcaaggcagccaacggggtgaaattcctggcttgcggacgcggacagtctccgcgtggtctgcgcgaccgggaagcacgtccggactacatcgtcatcgatgacttggatgacgacgaactgtgccgcaatgagaaacgggtgcatgacattacagactgggtgaaagaagccctttttggtgcactggatgtgggccgggggcgttttatcatggtcgggaacctcatttctaaaaactcggtgctggccaatctcaccaagacaaaaggggtacatgtatccgtcatcaaggcaatagacaagaacggagaaccggtatggcgcgaaaaatggacgaaagaagaggcgcaggaatacagggatttcgtaggctaccgggcatgggaaaaggagatgatgcacaaccccatcgtggacggcactatcttccgggcagactggattcgttacaagaaactgcccagactgtccaagtatgaaatgctggtctgctataccgacccctctttcaaatcgaccacttccaacgactacaaggcttgccgcctttggggcaagattgggaaggaactgcaccttatagactgttacgtccgtcaggataccgtttccggaatggtgcggtggctgtacgacctctacgaacgtacacgcgatacggcagccgtgcagttctttatggaagcgaacttcatgcaggatgtcattctggatgagtttgaggcagaaggaaatctgcgtggataccaactgcccatcatgccggacaaacgaaagaagccggacaagctccagcgcatcgaagcggtctcaccattatgggaacgcggtttcgtattctacaatgagaagttgaaagaatcaccggatatgcagaccggcatcgaacagaccttggctctggagcgtggcagccgtattcacgatgatgcaccggatgccgacgagggagccatctggatgctgcagcgcaattcaagacaggagagttttcaaccggtgttcggcaaaaggccgaccgccaaaaatatatggtaacatgatacagctgattaaaagaatgatttttgcatggcgctataaacgtgccgttgcccgtgcttgcaagtatgccaagctctacggaagaaaatactacgtcctgtatatgggcggcaaactgaaagttgtccccaaaaggaacatctgtgaactgattcaccgccaccgtttccgcaagggaaccactatccgggatatagaaaaaatggcattgttcatcactaaataataaggtcatgttcattacagaagaagattacaaagttgtcatcggcgacaacgcattgaaggttatttcgcaggtaagcccggaaaaccgtaccaatgcagaagcggaagcccgggaagaaattgccggttatctacggccgaaatacgactgtacggccattttctctgcacaggatgaacatcggaaccgcctcattgtcatgtacacctgcgacatttcactttaccacatgagtgcagccatgccgcaaaagatgggaagcgagatacgcaaggaacggtatgaacgggccatcaagtggcttgaaggcgtacaggccggaaaaattgtccctgatttgcctttggctgtcggagaagatgggcttccgtccggaaattcatttgtttacagctgtcagaagcagcttcatcataactggtaggattatggatattaaagactttttcagcggtatgttttccaataaaccgaaaaacgtactgcaaacgccatacggcaattttaatctggccaaggggaaagacatcaagcgggtgcagaaaatggtcatcgacctgcaacgcaccaccgatgcactcacccggaaggacatcaagaactggcgcgatgcctggcagtatgccatcaatgtggacagtcccagccgccagcgcctgtacgacatctaccgggacgcggaaatagaccttcacctctccgggtgtgtggagcagcgcagaggttttgtcatggcacgttctttcaaaatcgtggatatgaaaggggatgagaacgaggaagcggttcacttctttgaccagtcctggttcaagcagctcatgcgctatgcacttgattcaatctactggggacattcgctcatcgaattgggcgacctttgcactgacggcgacggctgcatctgttattcggatgtgaagcttattccgcgcaaacatgtcattcctgagtatgggcgtgtcattaccgacctcgggcaggactggactacaggtatagactaccgccagcctcctttttccgactggctcattgaggcaggtaggcccgacgacctcgggctgtatctcaaggctgcttcacagactattcccaaaaagaacatgctggccttttgggacaccttcggggaaatattcggaatgcccatgcgtatagcacgcaccacttcgcgcgatcagaaagagattgaccgtctcgacaagatgttgcgtgaagccggaaccgccctctccatggtggcaggaatggaaaccgaaatcgaatttgtggaaagcggcaagggggacgcattcaatgtctatgacaagcgtatcgatcgggccaactccgaactgtcaaagcttatcatcgggcagacgatgaccatcgaggacggaagcagcctatcacagtcggaaacgcaccttgaagtgttccagaacctcgtggaaagcgactgtgatatgcttcgggatatagtgaacaaccagctcattccgcgcatggtgcgccacgggttccctgttaaagggctgcgcttcgattgggactactccattgactacacgcccgaacagcagaaagcttacgaggaaatggtactgcaacactacaaggtaaagcctcagtactttgaggaaaaatacggtatcccgtgcgaggagaaggagccgaaggaagagccggacccgacagatccgaaaaaaaagaaagacggcaaaccggctgaaacgctgtcccgttttttcgactgagccccgatgattattcggggctgcaccagcgatatactaaaatcttaggcaagaattactcccatttatcattgtgcttgagcaaaagcgaggaaaacatcgaaacttcagcaaagaaatgggcaagtgctcttagtgacaagactgcaagagctaaagcagaagaagctgcgcgtattattttaaggcatggcatagagttacctgtgattaaagaatctggccgaatgaagaaaaggacgcttgcacaattccggagtgacggcactccaacaatagaagtcaataagaaattaaacgatgatttctggaaaagagacgcaagatctgtagaaattggttgggccgcacaagataatcctattctgcacgaactcggtcattacattgattttatttgcaataaagaaaaatataataaacaaagcgaaaacaaaagatttttcggtgaaacaaagtcactgattgaaaaagaagtctcaatatatgctgctacagaccaatgggaattggaagctgaattatatgcaggaataatgagaggaaaggtctattccaacaatgtattaaatctctcacggattagccaatctgacaatgatataattaaaaggctcctttcttatggaaccggccaagatgtttgtctgccaagtgaagacattagcaaacaattcaagaatatgatgaaagttctttttcagcaggaaggaagttctttttccattaacatcatggcagacaaagatgtgcaaaaaatgatagagactcattcttctgtcctgaacggatcattccggcaggtggaaatgtccgaggctatgcgcaaacggctggagcgctccaactatgtattctccgggctgaagacctttcatgaactgaatgaagcctttccctccttattggatgagaacggcaatagaaagacgttcgaacgctttttgaatgatgtccggaagatcgacgaaacatacaattcaaactatctacgggctgaattcaactttgtacaggcttcggctgaaatggcggccaaatgggaacggttcatgcaggacggcgaccgctattatctgcagtaccgcacggccggggatgcaaaggtacgtcccacccatgcagaaatggccggtatcacactcccggcttcagacccgttctgggaggatttctatccgcctaacggatggggctgccgctgttccgtagtccaggtacgcaaatccaagtatccggctacggatcatgaagaggctatggcaagaggagagtcagctttggaacttgacaagaaaggtatgttccggttcaatgcaggcatggaacaaaagacgatgcccgactataacccatacaccatcaagcgctgtaaggattgcgatatgaacaacggaaagatggaactggtcttcgttccggaaaatgaattgtgcgctgcatgcaaactggttcgggaattagcaaaagccgatgcaaaacaaacacgtgcagcagccaagccattacaaggaactattatccgtaatacacattttcatcatgatgtgaatattacaggtacctctattagagaatggactaatcaaccgcacaaacatttcaaagccaaaaatcaaatgctgctggacataaacaatgtgttttcaaatgcagcataccttggcacaacagataaccataaaggtatcaaacgtgtcgtacagtcacacatttttgaagtggaagtgagtggagaaaaaaatttgctgattgtccgtgaatatgattggggagaatatgtgctgcatagtatatcggatagtccggaactttacaacaagataaaaaaagaatagcaaaagaagcaatcttccggaactacaatccggcactggacttctaatgctattcctcactgcaaatatacaaaacaattttcaaaaacaactcattatgaacaaaattatcgaatttctcaaacaaagcaaccgctataagcaccttattggcggtcttcttgtaggatttgccgccctcaatccgtggacggctctgtatgcatccattatcgctgcctcctgtctggaactcaaagacaaactgaaaggcggactttgggactggatagactggtctcttaccgtcatcggcggcatattgtcggccatattttggtggatagtgtaatgctttagttcattttgcctgttaaatcagtaactttgtacccggcggagcttcccgatagtccgtgtggtctatcgcgggtacaacaatgcgaacgcgaatggcggtgtatcgaatgcgaatgcgaataacgatgcttcgaatgcgaacgcgaatgtcggctcgcgtctggaaatctaattaatcggcgtacagcaccggggacgtgtccccaatgcggtgccgagggaagcaagccacagcaacagcacccattagggtggaaagctgaaaaatcacgcgtcgggtggagtttggtaggctgttatcagttcgaagaagtcaggcccggggaaaggaaggcccttatcttccgtatttacaaaccaacagcagaaccgtatgcgcagggaaggatatatcatagaggaaatcatcgaatactccaatatgtcggaggcattcgaggccgtactgcgcggaacggatcgtaaaaggtcaacgcagggacggtatctgattgcccatagggagcaagttatcgccaaattgatggaggccattgcaagcggttcatttcagcttggtggataccatgaaagagaaatcgaggagtatggcaaaaaacgcaccctgcagattttatccatgtatgaccgcatcgcggtatatgccgtaatgaacgttgtggaccgtcatctgcagaaacgctatatccggactaccggagccagcattaaacgacgtggcactcatgatctgatgaattgcatacgtaccgatctacttaaagacccggaaggcacgctgtatgcctacaagtttgacatccgcagattctacgacaatgtgcggcaggattttgtgatgtggtgcttccgcaggatattcaaggacgaaaggctgttggtgctgctggagcggttcgtgacaatgctgccggagggtatcagcttcggactgcgtagctcacagggagcaggcaacctgcttctgtctgtatttttagaccactatctgaaggataagtacggggttcgttattactatcgctattgcgatgacggactggtactcggtaaaacgaaagcggaattgtggaagattcgtgatattattcacgggcaaatggagaaaatagacttggaaattaaaccgaatgaacgggtattccctgtagaagaaggcattgatttccttggctatgttattcgtcctgactatgtgagattgcggaaacgtatcaagcagaagtttgcccggaagatgcacgaggtaaaatcgagaaaaagacggcgggaattgattgccagtttctacggcatgacgaaacacgccgactgtaataagttgtttaaaaaattaacaggcaaagaaatgagaagttttaaagacttgaatgtcgcttacaaaccggaggacggcaagaagcgatttcccggagtggtggtaagcatccgggaactggtaaacttaccgattgtagtgaaggattttgagaccggtatcaagaccgagcagggagaagaccgctgtattgtggccatcgaagtgaacggcgaggcaaagaaattcttcaccaacagcgaggaaatgaagaatattctcgcacaagtgaaagaaatgccggatggctttccgtttgaaacgaccatcaagacggaaacattcggcaaaggtagaaccaaatatgtgtttacatgagaagagttgaaggaagcgccggtgttcagctgatggaatgcacgaacccggttaaagacaaatggcgcatccgctgggatgtgcaggaaaaagaggatggctcagcatcctatatggaagaagagtacagccataagcccactgatgaggaaatccgcacattgattatgtcctggtataacagccagactgatgcagctatcctatccggattcgtgtataaggatgcccctgtatggctttctacagaaaaccagtacaactataaggcagcatacgacttggctgttcagacgggcggagagacccttccagttacattcaaattcggttcggatgagcaacccgaataccatacctttgataatttggatgaattgaaggatttctatgttcaagcggtcagacacatccaacatacactggcagaaggatggaaaaggaaagatgtatgcaacttggaattgtatcgggttgattgagtgaatttcccacgggggaggaataaaaaaagcccccggcctgttaaaaatcatctcacctacttttaacttaaacgcatccagtgcgcacgaccgggggcaatgccctcgccgcgcactggatgcgttttttaaatcaaaagtaagtgagatgttgcaaatgtacaaaaattaactggatatgaaagtaattgagatactaaaattgaacagggagcttttaaaaacatgccattacatgggcatacgacccgatgatgtgcaatatatagaactatataatgaatataacaagttgcataccaatggtgaaaaagtgtcttatatcgtagcaacgctttccctacgatatggcatcagtgagcgaaaggtatatgacctgatcaggcgttttaaaaccgactgcaatttgtgtgcagtgtaatcagggcttcctcccactaaaggcaaattcccctaccctacctttgtatcgcaataaacaacattcatatcatgaacaaatattatcaaatcttaggcaaggtgctttcatccggaaagatgcaaagcaataagaaagggaatatccgctacctgctgaatgaacagctgacgctgctccctgccgaccttcttgatatattcgaagggcataccatagcgcggaagaagttaaaaaacgagctacaactgtttatgagaggcgagcgcaacgtggaaagatacagagaggtcggcatcaactggtgggactactgcggctcaatccttgtgaacagctacccaacctattttgaaaaactgccgccactcatcgaacgcataaacagggaaaaaaggaacagcaaaaactatatattgtttctcggatctacaggaacagaaagtaaccaggctccatgccttagtcttgttcagttccagatagagcaaggagaactggtcatgaccgcctatcagcgaagcagtgatgcaaatttaggactgccggcagatatttatcatttgtacctaatatcaaggcagattgagttgccgctaaaatccatcaccctgaatctggggaacgtgcatatttacgaaaacaacatcgacaaaacagagcagctgcttgccggcaatgaaaatgtaaaatttgaattgaacgtatgagaaagatgtatctgtcagcccctctcccatttgtcgggcaaaagcgtatgttcgccaaggaattcatgaaagtgctggagcaatatccggatgggacattgtttgttgacctgttcggtggctccggattgttgtctcacattaccaaatccctcaagccccactctactgttatctataatgactttgataactaccgcttccgcatgaagcacattccgcaaacgaatcagctgcttgctgacattcgcgaaatggtagggaattccgtaccacgtcataaaatcattaaaggagaactgcgtgaacgaatattcagccgcatcgagcaggaagagaataccaccggatatgtggatttcattaccctctcctcctctatcttgttttccatgaaatacaaactgtctgttcaggatatgcggaaggaagctttatacaacaacatacgtaagaccagctacccggaatgtacggactatcttgaagggttggaaatcgtatcctgcgattacaaggaagtgttcaaccggtataaagatattcctggggtagtatttcttgttgatccgccctatctgtccactgacgtaggaacctataacatgtactggaatatggccgactacctggatgtgctgaatgtactgaagggacattcatacgtatatttcacttccaacaaatcttcaattctggagttgtgcgaatggataggtagaaatagggatttgggtaatccttttgaaaactgcacaaaggtggaattcaatgctcacatgaattacagctcttcttacacggatatgatgctttacaagaaagaggccgcctgatggcgtttactttgcctgtattgaacagaaaagccgcagacggtaatttatacgtccacggcttttcgtttctaataatgacgactattgcatccgcttgatggccacacactgatacacctcaatactttccacaatatcctcatggttgtgattggtatcactctccaccaaatccagctccagaaaggtttccccactcaagccggcaagtctggcatgaatcagcccgggcaggtcaaacaccttcagcgcatcttcctgcagctcgcttccatcagcactcgaaccttcccagtctgtcacgatgtgcagcttgattaaaggttctgcccggtattccacaccgggaacaatcgcattccactgtatagggcagaattccacaaagacagccggacgctcccagttctcttcctgctcgatgaactccacattgtggttccacaagtctatgtgcttgataaggtcaatggccttcagttcgctgcaaagcagccgataaagttcttttctcattttcttatgatattatattcaatggtgaaatactctgttaggttctcttctacaatctcacggacggctttttccacttcaggcgatgtgccgaggaaacggcggcggggtatcttgatggtgcttccttctttctttaaagccatgaacatccaaaaatcggcttctgtatcaagccgggcatttcgtttgtctttccgcagctttccgtcctttcttctcccgaacgacccagtggcctcataatacttatgccagaagaaacgcttcatccgacctgtcaccactatttcaccaccatcattatgaatggccgcatagggcagagaagtaaagaaggtaatgctgttttccgtcgtccggctcccaatacttttccgaagcgccccggtatctgtcagtatggctctgccttcatcccggatggggcttttccgccgctgccatttttcactgaaaaaagcctgccgctcaaagttcttgtcaaactcatcgctcatttccacctgaatgtctttcagtatccgggccactacttttttaacgtcttcgttcattcccagtcaaagttaaatttcaattgtaccgtatcgtccggcaaatcgtttttagggtctgcggacgctttaagcatattgtagaatgtacgctcactaatagcatacacaggatatatgtaccgccgccatatttcacggttcggtacaccgtgactggcataatggtcatatatcctgtttacttctgctacacgcttctgataactaactccgtgccgctttcccatataggtttaatcgttcatagacggttttactttaggtttatagggacggatgtcaagcgtcatttttgcacttaccgttacccgaccacttccttcacactgggggcaaacaccataggtcggaaaagtggaataatcacctgtttttatgcggcctgtgccgtgacatacacggcacaaggctactttagagggcttttctatattctgtatcatatcaattcatattaagattctgtcattcccagtggaataggtttccacattccgttttcgttcttaatctcagcacggatgaactgtttgctcacttccggctggtaggcttcctcaatgatgcgtacaccttcaatgaaacggtcatctccggtttccatggccactttgcgaagctgcacgatgcgcgaagccttcagcgtacccttggcatcacgggccaacagacgaagcaccatgctcaccagtgccttggtcttttcatctttggccaagccttcgatatattccttcacaatggctataccgtcttccaccgtgtcacggtaaccgtcggtcacatacacacccagcgtgattcgtttgtcgccttcactgttagtaaaggtatggctgcgctggtcatccttcaccttggtcttgaaaaggtctgccttcatttccagaatggttttgaagttgtccatcacagtctgcttgcttgccttgatctgctcactgatgcccagcagtaccggaatggagttggctatctcctcatccaccatctgtttgtacatttcgcggtcattcttggctttttcctctgccgctttctttgctttttctctctggaaggcttcaaattccgccttttcctctgccgtcattaccacggtcgtttgtttcatttcttccatgattcttgttttttggggttattggttttcataatcctgcatttcaggttcgtcttccatcagcatagcctctccgttggcgtatgcccaatcagccagttcgctataaaactcggctgcatcctgcttctccatatcagaggcaagcaggttgatttcctttttcagattctctaaaatctttgtgtttctattttccatatcctatcagtttgccggagcatcagggtcaatctgaatgagtgacaccatgctcatggggttaatcgtttgcttttctttctttggcttcaagccgcctttccgttgtatggaccgaagctttaccgccagttcatccagttcgtccaccgtaatctgtctgaacgccttgccgactattcggggattactgcagaagtcattgattcgtgcccagtcagatgtatctatacccagcttctgcatcaggttcagacagagactccgtttccgccgcagctcctcacgcagcttctgccgccattcgtcttgtccgctcagtttctccagagcagtacaacaggcttcatactccttggccgtcatttccttcagactgtccgtccggttccacgtgtactgcagcacaatgcttttcttgaattcttcccggtctcctgtacagggcagcttgttgaacaatgcatagaaccgggcgaaattggttacttcctgtgccatatcatgatgattttatgttattcaaacaatactttaatgccacacgaactggccacatcaagctccagtttagcacctttgctcagttcccagtccttcagcatatagatatactcacaatccagcaacaagcgtatatccgcccgcatgtgctctctccagtgcgcttcatccggaagtccgtttttaaatggattcaccggattgaaccccatagcacgcaatctgttttcagcatcgaggaatgcacctttgcgctcatcgatattgtagtgggctattgccccactgatgtaaactttgtctttttccatatcacttctttttgatgttgactttacaacttggattccatatcagcacattacgtgcaaacaagacatcacccgtttctattacgacatgaccgggcgttttcgctcttctcactttcaggtcactttggatatttctctccagccagtcatccaacactgccctgctggaacttccgtccagcagtatctggaacacttcagttccggtgtagctttcaaaagccttctcgttattatccataatcattttggtaaattattacttgtttgaatgattccgtcttcccataccacataatagcttcccgggtctccaatggcgcgtccttgacaataagctttataaccgaccacccgaatcttcatatcacagatatatttcaatcttactgcaccgccacccatcggctggcttttcttttcctggctgatccagatgaaacatttcttcggaaaggtttccatcagttccacagcctgcggataatcccatccggccacctgaaaggaatcgatgatgataaacttcgggcttttcggctttttcagtctggcaatcacttcctccagactgccttctgtcaccacacgaaacttgccctgcacctcattcatcttcagataacccatacgccgttggaagctttggttgattttctcttcgtaactcatgtacagcaccgtcccatagttgcacagttcctttccaagttgcatcacaaagctgcttttcccactggcactggcaccgctgatgaaccacgaagcgttctctgccgggaacccgaaaggtttgctccatttctcatcccacggcagagtaacccatttcttggcggctatttccttcggactgtacgcacgcttcattattctgcagtcattttaagtttttcaatctcagtatagactcttctcaaaccaccgcgtgtcttccgtacaatctgggctatatcagcacctgccggggcatttaccttggccacaatacgtgcctggttgttcaagaactgttcgcgctccttgccatcatctggtgtcaccttgctgtaccggtcaccataacggctcaacatttcggtatagcccaccttcttacattctatggagcggttgattttctctttcaatccgtctgcccccatcatgtaccaggcgcagcagcgttcagtggcattccacaaggccttcagttcaaggaaagcttcatactgcaggtcgcctgcttcatcgaggatgataagcggggtttccatagaacggaggtaatataccaggtcttcatacacatcagaatactttcccttactgtccaccccaaactctgcagcaatcttgcgtaccagcttcaatttggtctttacctgcgagcagtcgatataaacggcattcttgtggctctgcacataataacgtgccgtgaaagtcttgccgatattgggcatgtcgcacaagatacccgacaggctggactgctgtgaaaactccagctgggctgtgatatattcaaaggtcggggtcttggctgctttccattccatttcaccacggaggttcacccctaatttccgggcaatgcttatccagttggcatcgctcagggctttgtctgtctgtccgttcttgattgcactgtacacagacgtactgatgcccaaagaggcagcatgcttggcatcactgggatagttcacacggttggcggctatcgctgctaaaatcttctgtttttgcgcttctgtaatcataattctaacgctgttttaatgttgttctaattctgttcttacatgtcactgatggccctcattgcctcgcttattccggagtgccattcataatctgattccggatctgccgacaagtcggctggcaaatcatcggatagttccaccgggggaagttccagttcctcttccggatcatccgttggctgatccggtgtaccggttcccacctttccgatggcgtggtcattgaggtatttgctgaaatgactcagaactttgttttgctctgtataggctgcccggtcttcttcggtctgttctgccatcacccggttgtaagtcactaccggacgaaccttgtcaaggtagcggtcgttctggaacaggaagacatccgtaggcttaccctcttcatccggcaggtagtaggccgtcaccctgcggttgtttggttccagctgctccagcacttccggaccgctcagccaccagtctgcatttgccacacgtactgtggaatttctacgaatactggtatctaccttttctccgatatatctgctcaaggtcagtttatcaagcggtcgaagggtcggattgattttggctacgagcacattccaacgggtcattccgggatatttcttttggttggggtgaagcgtattgttccattcttcacaatcgcgacggtcatccgccacaagctcttcaaacgtataatactttttgtcttcccaggtgtggttgctgctgtcgctcactttcttctgatccacccgccgtgcacccttaccataccagcggccaatgccttcatggttcttatgtgctatggttgtcttgaacgcaccgttcaggggttcagcatatttctcctgtgagttctgtggagcacagaaatgcacaaacttaaatacctcacctgtcttcaggaatccttctttatacttgctcagcaagtgctgctccacctcaataccggctggaatcccccatccgttgcgttcgatgagccggaacatatcacgaaaacagtccacaaccaaggcatcatccttatcccgcccgtaggccaaaccgatacggcactggctcaccacatcataggcataataggcatgcacatactcgccgcctttcattctgcgcggcaaatccacgtcatccatcgtaatttgtgacagtgaaaactcaccgccatgacggtgcatgtgcggcatttgctcatgatagaactccatacgtccacgcagggctttttctatcagcagctggcttgccgggttgttcagaatgttccggatagtgctttcgctcagttctttcggctccccgttcttgttcgtaaaattttccggattgaatatctctcctgtttccagatcccatacttccagttctccgcatacaaacgacagatacatttcatgcacatcactgccgtatggttggttgggaagtactttcaaactcatcaccaggcgttcgtccatgtgagttaccttccgcttgttctggttgccgaattttccggttatcagacattcgtaaccgtactgcttgtattcgttcactttcttgcggaaacgcagggtactggcaggaagatcatgaccaaagtcttcgcgtaaggtctcgatggtagtggccatcatgtcccagttatatttttcacccatcagtttgcggtaatcgttgcttctgttataaagcttgatacaagtattcagaactgaagcattcaccgcatatttccgggcaagttcgtctgtagctctgttgctggaagaatgagaggcccaatccaaaaaataggctactgcagcctgatccagcacatagtttgatagtatccagtggcgaagtgcctgctctgttccaccggggttatcttccttcacccgttccaggcactcggtaggcagactattgagggcgaccaacgcgcaatttccagcagcacctccaccacggcgcaccaccttgatacgaccacggttcacccagttcctataacaggattcggtgatatagccgccatctatgagctcacgtgcagaaatacactgtatgttaccgtaatacaccaacatagccgcctcctatctcaatgccgatgcaaacgctttaatgtggtcaatctccgaaaccattacatgctcaaaggttttcacagtctcacctttgaatattacctggccgctaccatccttacggtcaagctctataagagcaccattgggacaatataggcgggatactttgtcatagtcgtgaaaaacctccacctccggaataacaaccatcacaataccgccacggtccatggccaacttacgaatctttgcagaaagttcggagttgccacgacggtcatcaaaacggatagcgttataaacagtcttatctgtcacgttgagcgcctttgcaataaagtcgcggtcagctttcgtaatgtgaatgtacctcttgttcatatctcacttattttaatgattaatattggagggagtccggggaatcgaaccccggcgcaagaaccatgcactcccgtgtgtctttccacaccgtcacccgtctcttaacgccttccgggttgtcacgctgggttatcctgagtatctttacttgattgattctttaattccacattccgaatggtctgcagcagctctgcttgaaaacatacacacattgtatagacctcatctttaaatcttgtattctgcactggttctacatctttcatctgaataatggcactggttaattcgttcatcaggttatccagcgtcttgggatttactttcatcaataatgtctctttcataatcttatacttaaaaatcgctaatcacacgccttttttgtatctttggcgcggtgttcttttttgaacacgctgcaaatgtacagaaaatcctgtaataacaaaagatatgaaagaaaaaaatacagaaatatctgcaagaatagaagaagttatatttatcttgcacactaatccaaataagttcgccaatgcattagggtacagtagagcccaaactatctatgatatagtaagcggaaagtctgctccaagctatgacttttttaaaaggtttataatgtcaggatattctgtattcatcaaccttcgatggttatttactggggaagggaatcctataattgaagaaacttactatgaatcagatttgccaattattaagggggaaatgacagaagagcaagcacaagctaagttgaaagcagttaaagccgcaaagaatcaaaacaatatacttcatgaggaaacaaataatagtaccactgaatctttcttgtctataataagagagcaggcagaagaaataggaaggcttaaagaacagattcgccaaatgacaatcgaaaagggaaaacatgtgtcggatgcacacatttccggtactgcaaatgtcgggtaggcggatttactgttaccatacaccggtgatgggaaacgaagcgtaccccctatcaccccccatgatgtccccctcctaagcaatccccctcccctaccttcatatatgggtataaaaacactgatattagggcatttaaaaactaaagcgtgaaaaatgataggtttttaggggggggctatcaaataaaaaacgaggggtatttttaaaattatagtattttagtacgtctgtatcgcacaccgccaaaaccatattttgaatatccagttctataaaagtgaatatccactttgaacatccacctgaatatccagcgtcaaaaaagaccgatttcaagcacaaaaaaagggaggtataaccacctccccacaccggatcattctaaagccatttttattgcgtttttggccgcttactattcgtctgacacatttccactacgcccgcaagaaatgagcgtagattgctttattatagcctttttggtgcatatagtaccgttcccggacaatcctgcatgcagcaaataattcttcgttgcacccacctgttcagctgtaaaaacggtataaaccgccgaaatgctgctgaaataccaatctttccgctttgttccttctattccgtgcgtcaaatgcacatgtattacctttgccatagtttataatattttgctacaaatataccaaatatctattatatggaataaattaagcaatattatatcaaatcatcaggtacaaaaaaagcagccgcagctgccatgcactcccccacccgaatcaaccatgtaagccctatgtaaacccaattaaacctatctgcaaatctgtatgcctaaaaagcacctaaatgtagctgcaaattaaacccacgtaaacgtttcgttttgcagagccatccactcatatcttgcacaaccttttgtatatcaataggtttgatgcctttttctcccaaccctcaatatacgtttcgttctgtgccccatacaagcgatgctttatctatgtcatcaaaagtataattatctaatatgcgcgaatccgcagatacagaaacatttgcatctgcatacatacgtttaacctcttgttctgtacatttgaaatcaccttcgtggttacgcttatatgtaccattgtaagggttaggtgtatgaaagattggacgttgttctcttgctgcacgtggaatataaaacaagatgaatttatgtccgtcaagttctccatcaataacatcatcattgctcaataaattgagattgacaatatctttattattgactccactccaaaactcctttttatatttttcaattaaatcgtcagttaaattatccatgtagaaatcgcccttcttttcttttattccaagaacaatggtgcctccattggtattgtcaaaagaagagtaagtctcccaaaaagattttgggaatccaccagcaactgatttgaattcaatttctgcagattctttcttttccatcaattcttcaacgaacgatgaaattttcaaataattatacaccctcatatttcacaatttccaatatattacaaaaatccacaatgtgtacactctttcttcaactctgtcaatgtattgcagaaagaatttccctcctctactccaccgcgcccaaataaaagctggtggaaatatcgttggtcaatttggatttgaaaaagccgtagagatagaaaggacccgtaatatcacgaggaattgaccagtcgaaggcacctgcatttcgctcgacagaggtggattcgacaatccagatgcggggagcctcttctttgttcggagcgtagacagcaatacacaaccggtctgtcgtattctcataatcggctgtttttgcatcccaagcaagccgtagtacaccttgcgaagtgattttcgctttcaccgatgccggttgtggaagtgtgccctgcgcaaccaccaaatcctgaggattgagcaaactgccatccgacccgacatggcggatattgctgcgcataaacagattgtaaccggtgagatttgtgccggtacactgttctttccaatagaccgacaattgtgaggagagcccattgtataaggctgcaaccccttttactcgagaacgctgtgcctgctgacccggagtcttggcatccctataatgattgcttttagaacgtatacgcaattcttctccaacccgataaaataccagattccctattttgccacgcaaaccttccaataatactgatttccctgttgccataatatttggttaatgattagacatacccaaatatagcatttttataaggcaaatgcaagttaaattatatttaaagataaccgtctgttatctttgatatatagttgtgttatatttgatatggatttgacataagtttaagagggagggaagtgggacaaaagtgaaggagaaagatgacttcaaaagcaggtgtaaaaaaatagccgaaatctcttccggctacctgtatcgatgttttcagactttatttctgatcgtcccagtccatgcgtttgaagccttgacccataatttcctgtgcattcagaatcatggtgaaagctttcggatcgatgtgctggatggcacgctgaagggtggtcacctctttgcggttgactacggtcataatcatctctttctcctgacggttccacattccgtttaccggcacgattgaaccgccacgatgcagttcagtaaggatatattgacggatctcttctgttttttccgagatgataaagaaggtcttgtcgctggagtaaccgtcgattacaatgtctatcactttacccataatgaagatggttatcaaggaatagaacggggttttccaatccgggaatgcaacgaatcccaatacaacgataatcaggtcaacggtcatctgcatcattcccaacggacggcgggtcagtttgtgcaatacggctgccaatacgtcggttccggcgctggatgaacggctcttgaaaatcaatccggctccgattccaatcaccactccaccaaagatacaagccaacaatacgccttctttagctgaatcgggatttgcaatacccccctttacaagttgaagcggatcatgtgcaaattctgacggataaccgaatacatgctccagcaaccagggataaccgtcggcaaacaaagctacaagccaaaagcatataaaggtgcggaatccgaaatcacgccctaaaatcttaaaaccgatcaagcttaacggcaagttaaaacacaaagcagccataccgatcgggaagcccaatttccaattcaaaatggtggaaataccataaatacctcccggaacaatctggtaaggagtcataaaaaatgtgtagcctaatgctatcaccatcgaacccaaaagcagtgtgccccaggtcttaaaccactgtgctgaaaaaattttttccttgtagaaagaaggttttgtaacattcatgatataaaaaaaattaaatcttcaatttgcgcgcaaatataccaaggtgtttaatcataaaacatgacaaatgtcatattttaaaaattgtatctttgcagttgtatatccggaaaaataattagatttgcacaaatttttgacgagtgtgcaaatcaaaccattgcacggcagtctatgagaacaaaattgagtagaacaaagagtaaaatcatacatgttgcgaaagcactgtttgcagagatgagtgtttataaggctacgatgagcgatattgcaaaagcagccaatatgagccgacgtaccttatatatgcacttcaagagcaaggatgagattttccaatatgtagtggaaaaccaggttgaaaatatcaccgagaaactgcagaaggcggctgactcgcagcttccgccggacaggaaattaaaactgtatattctggcacgtttcaatgtggtggacaatctggtgaggtataataagtatctgcggtatgattttatcttctataatctacgcatcgagcagttaaggaagaggattgacgtaaaggaaagacagttattgtcccacattctgcaagacggcaaggatatggggatatttaatataaataatccgtcatcgttcgccaaaacgctattgattatgttcaagagtctggaacagccgtttgtcattatcggcaacagaaaaaggaactatcagtcgctgagggaatacgtcgacctgttgtttaacggcatattgaaaaaagaaacacaaaaataatgctatagacaatggagttgtatattaacaaattgagtcactatttgcccgagaatgttattccaaacagttattttaaagaagtaaacgggctggatgacgagtggatttattcccgcacaggtatcaagaaccgcagcaaagccggagaagacgaaaacaccaatacaatgggtatcaaggctgtggatattgcagtaaaagatttaccctacccgattgaggaggtcgatttaattgttacagctacatactcaccttacgacactgtcgctacgccttcgcacatggtgcaaagacgctatcatattgaaaatgcaaagtgccttacggtatcttctgcctgctcttcgtttatcaatgcaatggagattgtacaaggatatttcgccatgggaaaagctaccaaagcattggttatcggcgctgagcacaatacgggctatgccaacgaggcagacccgcaaagcggccacttgtggggtgacggtgctgttgccttgtttgtttccgcccagaattgcagtggacacgacccgcgtatcgtagatatctacacccacggattgggccacatcggaaaggctgccgaagctgtgtatctgcgtccccaacacggaggtatcggaatgccggaaggcagagatgtatttgtaaacgcctgccattatatggtggatgcactggagcaggtcacccgcaattatggaaagacagtgcaggatttgacttggatttcttctcaccaagccaaccagcgtattatcaaaaccatttcaaaacagactgatataccggaagatcgcttcctgatgaatatcgaacaacgaggcaataccggtagccccagttgtgtaatttcgttgtcagagaatatagacaagattaaagaaggcgatttggtaggactcaccgtattcggtggtggctattcatgcggagccatgttattgcaattctaggaaaacatattttccacatttatataaaggcgttggaagggatatctatttcccttccattttttttatttttacaaaacaagaaaaagcactatttttgtctgcaaacacctatacaatatgaaatatactatacttattttattgcttgcgcatttctttgcagtatgcggacaagagcaatcgaccgtggagtgcatccccatcaacaagggatggacgttttctgaagccggcaacggaaattggatggaagccgttgtaccgggaactgtacaccaggatttaatccgccacaagttgctgcccgaccctttttacggattgaacgaaaaaaagattcaatgggtggaaaacaaagactggatttataaaaccagcttcaccctgacccccgaacagattgccagggagggcgcccagctcgtttttgaaggcctggatacgtatgccgatgtttatctgaacggctcgctcattctgaaaagcgatgatatgtttgtcggctatacagtgccggtgaaggaggtgctgcgcccgggtgagaaccgcctgcagatattgttccactctcccatcaagcagactctgccacaatgggagaccaacggattcgaatatcctgccgataacgaccattccgacaagcgggtgagcattttcagccggaaagctccctacagttacggctgggactggggtatccgcatggtaaccagcggtgtttggcggcccattactcttaggctgtttgacattgcaaccattgatgactatcacattgaacagctcacactaaccgatgaggctgcctcgatagccaacagactggagattaacagtcttgcaaccaaaccgatagctgtaaaaatggaaatccgttgctcgctcggcgaccagccggcacagactgtcagccgcgacgttgagttacagccgggtaagaatttgatagagattccgcttgaaattctaaaaccggaacgctggatgcccaacggatggggaaaaccgcatctttataacctgactgccagcattataaacgatgcaaaaacaattgcccaaaccacccaacgcatcggattgcgtacgattaaggtggtaaacgaaaaagacgagcacggcgaatcgttctattttgaggtgaacgggataccgatgtttgccaagggcgccaattatatcccttcggatgccttgctgccggctgtaacgacagaacgatacaaaaaactgttcagcgatatcaaggaggcaaatatgaatatggtgcgtgtatggggaggcggcgtttatgaagacgaccgtttttatgatttggctgatgagaacgggattctgatatggcaggattttatgttcggctgtaccagctaccctgccgaccctgcctttctaaaacgtgtggcagaggaagcggaatataacatcaagcgtctgcgcaatcatgcctgtctggccatgtggtgcggcaacaacgaaattctggaaggcatcaaatattggggctggcaatcccgctttgctccggaggtatatcaacaattccaacatgattaccgcaagctgtttgaagaattgctccccgcccaagtggaaaaattcgacagtggaagattttacgttcattcatccccctattttgccaactggggatgtccgcatacctggggaacaggcgacagccacaactggggaatctggtatggcaagaagcctttcgaatcaacagacacagaagtcggacgctttatcagcgaattcggattccaggctttcccggaaatgaagaccattgccacttttgcagcaccggaagattaccggcttgaatcagaggtaatgaacggccaccagaaaagcagtatcggcaacagtctgataaaaacctatatggagagagattacatcgtgccggagaaatttgaggattttgtatatgtaggactggtgcttcaaggacgcggaatccggcattgcatagaagcacaacgcagaaaccgcccctactgcatgggtactctctattggcagctgaacgacagctggcctgttgtttcgtggtcgagcatcgactattatggcaactggaaagcccttcactaccatgccagacaggcctttgctccggtatatgccaatatcacatccataagcgacaccctcgccgtatatcttttctccgacctcttggagacacaggagaatctgacactggaattacagttgacggacttccagggcaagaaagggaaatgtgtgaaactgcccgtatctctccctgcaaacagtgtgaaacaggtgttcagtcagccattaggccaatgggtgacacccgaagatagaaccgaccggatactgacagtcaaattaaaggaccgtaaaggcaacatcctcaccgagaatacccactattttgcccgcacaaaggatttgaatctcccgaaagcaaaaatagattataagacaagaacttttgacggacgttgcgaaatcacattaagcagcaaacaactggcaaaagatgtatttatccaagtgcccatgcagggcgctcatttcagcgacaatttctttgacctgttgccgggtgaaagcagaaaaattgtcattacttcagctgatatcaggaaaggcgaaacaccggcaatcactatcaaacaaatttgcgacacttattaaacaactagcaatgaaacgatattcttatttttacacactctgttgcgtagctcttctatggaccggctgcagccagccaccagcagtgaaagactatgcccaatatgtgaatccctttatcggcaccggaggacacgggcatacattccccggcgcagtagtgcccaacggtatgatacagccgggaccggacacccgtatctatgattgggatgcctgctccggttattattatacggattccactatcaatggtttttcgcatacccatctcagtggtacgggatgcggcgattatggtgatattttgctgatgccgaccaccggcacccaacgcatacaggcagaaaacgcccaaccgaaacagcagacattgccttatgcctcgcgcttttcgcatgataaggaaactgccgttccgggatattattccgtgtttctggatacatacggagtgcaggccgaactgacggctaccaagcgagcagcactgcaccgctatacatttccggagagcaaggaagccggttttattctcgatatgggatattctctccagggacaacgtaatcgggaattatccatcgaaatattaaacgattcgaccatctgcggccacaaaaacacaaacggttgggcatggcgacaggatatctatttctatgccgtattttccaaaccgttccaaggagttgttgtcggagactccacccgagatgcctacggctattacccgacctctgccaaaaaggctttgttgcaattcacaacccggaaaggcgagcaggttttggtaaaaatcggtatttcggctgtcgacatcgaaggcgcacggaataatctgacagagatacccgactggaattttgaccgtgtcaaagcagatgcccgccattcgtggaatgactatctgtcaaaaatagatatagataccgatgatgaagagcagaaaaacatattctatacagccatgtaccacaccggcatttcccctgccctcttcacagacaaggacggacgctaccgaggtctggaccggcgtatccatacagcaaaagagggaaaaccgatgtataccatattttcattatgggatactttccgggctcttcaccctctgcttacaatcatcgatccggcattgaacacctcttttgtcaatgccttgctacagcaatatcgggaaggcggcattttacctatgtgggaactggcaggcaactataccggaacaatgattggctatcatgccatccctgtcatcgtagacgcctatttgaagggtagtccgattgatgccaaactggcactggaggcatgtttgcgaagcgcagaatacgatacggtagcccctatcgccacaacctcttatttgaaacatcatgcgttgatgcctgtttccaaatattataaaaatacctggggatatattccttgcgatgtggagaacgaatctgttgccaaaggcttggaatatgcctataatgactggtgtatcagcgtactggcagaagcattgggagatacggcaattcaacacacttatcaaaaacgcggtcaggcttatcgcaattattatgacgcatccaccgggtttatgcgcggcaaagacagccagggacattggcgcactccttttaatccaagagccagcaaccaccgtgcagatgactattgcgaaggcactgcctggcaatggacctggtttgcacctcacgatgtggagggtctggtggaattaatgggaggcacccaagcattctgcgaaaaactggattctctgtttgtggcagattcatccctggagggagatttggtgtcagcagatatttccggactaatcggacaatatgcccacggcaacgaacccagccaccatattttacatttgtacaatgcaatcggacaaccttggaagactcagcagctgattgataaagtgctgcacacacagtatttcaatgccccggacggtctatccggcaacgaagactgcggtcaaatgtctgcctggtatattctgaatgccatgggattttaccaaccttgccccggccggacggtctattccatcggtcgtcccctgtttaaagaggtgacactccatttgccacaggacaaagaattccgcattgtcacccgaaacaacacaaaggacaataaatatatcaaggcagtctctctaaacggcaaagccttggactgcccttactttacgcatgaacagttgatgcaaggcggattattggaaatcactatggccggacaaccgacagattggggaacaaacaaataaaccgaattatgaaacgactaaatttatatgttcgatttatattgtcaacagcgttctgttgttgggcgctcgttgcagccagccaaacaatcattcctgccccgaaagagttgtttattggaaaagattgcttttatattaacgaaagcacctctctctatacaaatctgaaaggtgctgaaaagagagattttgaagaatatctgtctaccctgcccgcccccttcaaccggggtatgaaaacatacaaaaaaaataaaagcaacagcattgtatttgctctatcgccgagcagatttcgtgagtcggaagaaaattacacgctatatgtcaataccaagcaaatcattattacagcgttgacacccagcggccttttttatggtctgcaaagtctgttgcaaacggtgcagcctcattccaaaaaaggactgaaggtgccgtgtattgccatcaaagacactccgcgattcccttaccggggctttatgatggatgtgtcccgtcatttccgctccgttgattttatcaagaagcaaattgacgcactggcacgctataaaatcaaccgtctgcatctgcatttaaccgatgctgccggatggcgcatagagataaaaagatatcctcggctcactgaatttgcagcctggcgacctgttgaaaagtggaaagactggtggtttgccaaggatggccgaaaatactgtgaggaaggtagtgccaaagcttacggaggctactatactcatgaagaaatcagggaactggtaaaatatgccgcacggagacatatcaccatcattcctgaaatcgaaatgccgggacactcagaggaggtgcttgctgcctatccggaacttgcctgcagcggcaagtcttaccaaagcggagaattctgtatcggcaatgaaaagacattcaccttcctggaagaggtattaaccgaagtcatggcactcttcccctccgaatatatacatatcggcggtgatgaagccaaccggaaagtttgggagacatgcccccactgccaagcacggatgaaatcagaaaacctgcaagaaagcagtcaactgcaaagctatcttatacatagaatcgaaaaattcctgaatgcacacgggcgcaaattattgggttgggatgaaatagttgaaggcggactggcccccaacgccaccgtcatgtcctggcgaggagaagaaggaggcatcaaagcagtgcgggccggtcagcaaacggtgatgactccgggttctcattgttattttgatgcttatcaggatgctccccatacacagcctgaagccatgggaggctaccttcccttgtcgaaagtttatggatacgatcccgtaccacaacatcttactccggaagagagtaaactgatttacggagtgcaggctaatctctgggcagagtatatccccggggatgaacagtacgaatacatgacgtatccacgtattatggctcttgcagaagtcggatggacgtttccggaacgtaaatcattccgggacttccatgcaaaagctttacaggaagtggaaaaattgcaagcccgcggatatcaccccttcccactaaaagacgaaatcggacatcggccggaatctctgcaacccattgaacacctgggcagaggtaaaaaagtgacttacaatgccccctataacaacacctattccgcacaaggagaaggtgcattgactgatggcaatcgaggcgactggacctattcagacggttcgtggcaaggcttcatttcccgtccccgtatggatgtgacagttgatttggacagtgtgaccaaccttcaatccattgaagccgatttcattcaagtggtcggcccggaagtctttcttccttgcgagattatcatctccatatcaaacgatggggaacaatttacagaaatcatgcacctccacaatcagatcaaccgcaatcaggctattgattttaaaacttatggctggcatggcaacgtgcaggcccgttatgtacgctatcaagcccggtccggtcaacaatacggaggatggatatttacagatgaaattgtcataaaataatttttcaccttttaatcaatgaatttaatgaaaatattaaacaaatacattctaacagccttggttggtatttatactgcatattccgcacaggcacaacaaatgccctacaatccggtagactatgtactgccgcttgtcggtactaccaactatggcacaacaaacccgggagcccgcagtccacaaggcatgatgtctgtcgttccttttaacgtcatgggttcggtcaatggtaatcgggacaaagacgaacgttggtggtctactccctatgaatacaaaaacacctttttcaccggatatgctcacgtcagtctgagtggtgtgggatgtccggaacttgcctcgctactattaatgcccacaaccggtaaattaaatgttgattatttggaatacggcagtccctataccaatgagcaggccagtccgggatactatgccaataccctgaccaaatataatatccaaacagccgttactgcaactccacgtaccggtcgtgcccgatttacctttcctgccggagagagcaatattctgctcaatctgggagaagggctgaccaatgaaaccggagctaccgtacgttttgtcaacgaccgcgaaatagagggaagcaaactgatgggaacgttctgctataatccggatgctgttttccccatctattttgtcatgcgattgaacaagagtcccaaagaatacggatattggaagaaaatgcgtccgatgaccgttgaagcacaatgggattccacttccgggaagcggaaaatctataaatcctacaccaaagaaatgagcggcgatgacatcggcacctggtttacctttcatactacagccggagagaccattgaagtcagcttgggagtatcgtttgtcagcatagagaatgcccgccaaaatctggaaagcgagcaggctgcacattcatttgaagaattacatacaatggcacgccaacaatggcaacaggatttgagccgtattctggtagaaggcggtagtgaagagcaacggcaagtgttatataccgctctttatcattttctgatacatcccaatatcctgaatgatgtcaacggagaatatccagccatggaaagcaacgaaatccgcaccatccaaggcaatcggtatactgtattctccttgtgggatacttacagaaatgtccaccaactgatgacccttctcttccccgaccgacagctggatatggtacgcaccatgatagatatgtatcgtgaacacggctggctgcccaaatgggaattgtacggacgtgagacgttgactatggaaggcgaccccgcaattcccgtcattgtggacacttggcaaaaaggcttgcgtgattttgatattgaaacagcctacgaagccatgtataaatcagcaaccatgcccggtacggaaaatctgatgcggccggatgctgatgattatctccaattaggatatgtacctttacgtgaacaatacgataattccgtatcacatgccctggaatattatatcgctgattttgccctatcccgtcttgccgatgctcttggcaaaaaagaagatgcaaaactattttaccagcgctctttggggtatcgccactactattgcccggaattcaaaatgatacggcccaaactcccggacggtacattctatgccccttttgatcccatggaaggtgcaaattttgcaccgagccccggttttcacgaaggcaatgcctggaattacaccttctatgtcccgcacgatattaacggacttacccgactcatgggcggtaagaaaaactttgtaaacaaactgcaatacgtgtttgaccaaggactgtacgacccggctaacgaacctgatattgcctatccatacttgttcagctacttcaaaggcgaagaatggcgtactcaaaagttggtgaaagaattgttggaaaaacatttcaaaccgaccccggatggaatccccggcaatgacgatacaggtaccatgtcagcatgggctattttcagcatgttaggtttttatcccgattgcccgggacttccagaatacaccctgacgactcctgcatttgataaaattacaatccgcctcgacccacgctattacaaacaaaaagaactgattatcacaacgaataaaacgacagaagagtctatttatatccaagatatcaaactcaatgatcaatcatataagggctaccgtctgacacacgaccaattgattaattccggacatattgagtttattttaaaagaaaaataaataaagaagggatttgctttacagtgaatcccttcttccatcatagctatttaccgtcctatactttttctacataaacctgcccgctctgatattttttcacaacaatagctgttccctttgtaatgtaatctccccaaagagtcacagcatcatagatttcattatccacaattactttaccggcaggccgcaaatcagttgaagccattccaacttttccaacaacagaccgcactgtcatatcaacactgacaaatccgtcctccggtcgctgttctgcatgcaaagccaatgcccatttccttgttcccaataatttagcacctacccacatacttatacctaaagcaatcagtgaactacttaccaccaagaaaagcgaacgcaaaatgaatccggcgaagtcacccaaaaattcaaaaggaatgtggtctattccagcaaataccaatgcccctacaattaacaaaatacccgaaacgcccgctactccaaatcctggaatgacaaatatctccaataacaaaagtatcactcccaacacaaaaaccacaatttcccaattgccggcaaaaccttccaaatacagaggtgcaaaataaaataaacaggcagtcacagccgccaataaagggaagcctatacccggtgtctgtaattcaaaataaatacctccgacaataatcattatcaacaatccctgcaacatcggattgattaagaaaccaataatacggtccatggttgtaggctgatatgacttcaaagtatactcactgacatgttcctgctccaatacctgctcgatgttttctgcgataccatcacaaaaaccatgctgcattgcctcgtggggcgtaaaagtcactatctgcccactatccgttaccccttcgatgtatattctttcatctaccattgcttctgcaatatgcggatcgcgtttccaacgaacttgcatttttccatcaaccgccaccgtatctttaccatgagattgggcagtagccctaatcatcgaacgcatataagactgatatttatccggcatcgcttcgcccgaagtaccatttacaacagtcgcagcgccaatatttgcaccttcacgcatatagattcggtcacatgcaatagctatcaatgctcctgctgatgcggcattattatctatgaatgcccataccggaatggaagtattcaaaatcagactacgcagagaatcagcatatatcaccattcccccatatgtattcagatgtaatataattttatcggcaccctctttataagcctcatcaaatgacttacgtgccaaacgccaaactttgggacctatttcatccttgatatccactgtatagaccaattccttgccctctgcaatccgattgacagacaacaacaacaaaaggcaaaagaaacatttgacaattgaattcatttttattgcaattcttaatatttagtaatttcagcagacaaacgattgtcacgattgttcacgactatggtaccggcaatgacggaaagcaacgacaggaaacaacaaacaaaaacattgagcaagggcaccattaaagctaccgcaaaaataaatccaacacctgccgtttcgccaatattcttatttacgtaacgcacactgtcgcgtacattcaactttttgcgttcaatggcataatccaaaaatgaaaatccataaaaataagatgatacaaacaacatcaggaaaggtgtcaataaccccacaaaaggtataaatgaaacaaagaaaagcagaatagaaattgccgtctgtaccaccatattacgcaaagcaatcaatacccctcgcagaatatcacacaacaattgcttcatactaaaagaataggtacgtcctgtgagttgcatctctgctcgctcggaaagccaggagtaaataggagacatgattatcaataccacatatccactgaacatggcgaagaagaaaaaataagccaatctcgccagcaaccaaaccaaccatccggctacatcatccaaccattgcaaccaagaaatgccttcaatccaggaagacaccaattgtgaaaaccatacattcaaactatctcctaaaaattcggacaccatattcccaagaacaaaaagcagtatcaatgctacaacgggaaataaaagaaaccacgcaaattttttactgaaaagcatgtgcaacgccggtgcataagcttgaattcccaaaaagaatcctctcataattgtctattttcattaatatttaccacaaaggtagcaataatcggtgagatatggaaaagtagagcaaagttattgagaaataggctttttgagaatatagcttctgtaaccggatgacgggaaaagtcaagtctgaaccaagttaggacttcgctacgttaccgattcgttaccctgcataattggtggtatcggagcttaggaaaaacagcgaaatacactattatatagtgagttactgacaactcacgcaacaattccggtaacggataataattgcaccgttcctctgctatttgcgtatcgacgaaggactcttcaccaagtaattttgaaaccaaaaaagttcagaaagatgaagagtacattttcagttatcttctacctcaaacggcaggtagtgaaaaaagacggtacagtgcccgtcatgggacgtatcacggtggacggaagccagacacaattcagttgcaagttgtctgtcgatccgaagttgtgggacaccaaaggcgggcgtatcatgggcagaagcacggcggcactcgaaacgaaccgcctgcttgacaagatgcgcgtgcgcatcaacaaacactatcaggaaatcatggagcgtgacaactacgtcacggcggaaaaggtcaagaacgcctttctcggacttgaacaccgctaccataccttgatgcaggtattcaaccggcataatgaggactacgagaaacaggtggtggcgggcatgaaagccaaagccacgctttccaagtacaagacagtgtacaagcacctgcaagagttcctcaacatccgctaccatgtgaaggacatcgccttgaaggagcttacccctgcattcatctccgacttcgagatgttcctccgcacggacaagcattgctgtaccaataccgtatggctgtacgtgtgcccactgcggacgatggtgttcattgccatcaacaacgagtggctcacgcgcgacccgttcagggagtatgaaatcaaaaaggaggaaacgacacgcagcttcctgacgaaagacgaaatacggcagttgatggaagggaaactgaagaacgccaagcaggaactttaccgcgacctatacctgttttgcgcattcacgggcttgtccttcgccgatatgcgcaatctcacagaggaaaatatccgaacctacttcgacgaccatgagtggatcaacatcaaccgtcagaagacgggtgtcgtttccaacatccgcctgcttgacatcgccaagcggattatcgacaaataccggggattgtgcgaagacggcaggatatttcccgttccccactatatgacctgtctgtacggaatacgtgccgttgccaaacgttgcggcatcacgaagcatatcacgtggcatcagagccgccatacggcagccacgacggtgttcctctccaacggcgtgcccattgaaacggtgagttccatgctggggcacaaaagtataaagactacccagatttatgcgagtgcgcccagaatggtcgcttaataaatacttctttagcaagaagttaggattgggttcgatatagtcctatcgtcaatcagtttatccaaaagggaaacccgatggagagtgtagcatactgattaaagctccaagtccactaatagtcaggtggcgactgaggggcaagacgaaaagacatacataaggatgaagccttgattggttgaatgatagttcagtggtaccaaatcttgcaacaacggaagactattatacatacgttgtttcatagtactctgcctattttgtgcgttagtgcagagcataaagaaccgactatgacacagccgcaataagcggacaagaacgaaagtcacatccgacagtatgtcgtgctaatagttattaagagaactaactggggattacctaagtcggaacgctggaacaaacagctataaagaaagcttttgaatatccgatatggtaacggaacttccgtagtagtctgagcaagggaaagccttgtacatggcgaagggaagtagtctgtaactttaatacaaacaacggaaaacgtgagagacgtatgagaaatccagagcaagtattaaacattttagctggacacagcaatgagcccgagtataaatacgaaaggctttaccgtattctattcaatgaacagatgttctttgtcgcctaccaacgtatgtatgcaaagccgggcaacatgacacccggcacagatggcaaaactgaggatgaaatgagcattgataggataaacaaactcatagagagtataaaggatgagacttatagtcccaatcctgcaaagagaacttacattccgaaaaagaatgggaagatgcgtccgctaggaataccgtcttttgaagacaaattggttcaagaggtagtaagaatggtgcttgaagccatatatgagggacactttgagtggacatcgcatggtttcagaccaaaccgaagctgccacacagcactgaaaagtctacaaaacaatttcaacggtgcaaaatggttcattgagggagatataaaaggcttctttgacaacatagaccataatgtgctgatagaaataatgaaagacagaatagcagacgacagatttcttcgtctgatacggaaattcctcaatgcagggtacatggaagagtggcaattcaacaagacttattcagggacaccgcaaggtggtatcataagccctattttggcaaacatatacttagataagttcgataagtacatggatgaatatgccaacaaattcaataaagggacagcaagaagccgcaacaaggatatttgcaaactcaacagcagagtacactacctaaaacgtaggataaatgaagtagaggatgtaaacgtaagaacaaggatggtagaagaactgcacgaaaagcagaagctgatacttacaatgccaagtggcaatgatatggatgtaaactttcgcaggttgaaatatgtgcgctatgccgatgatttccttatcggagttatcggaacgaaaaacgaatgtgagacaatcaaagctgacatcactaagtttatgcaggaaaagttaaggctggagatgtcacaggaaaagactttgattacaaatgcacaagacagcgcaaaatttttgggttacgaaatatatgtccgtaaagactatgccacaaagagaaacagtaacggaacagtgcgcagatacttcaacgggaatgtgatactacacgtttcaagagaagtaatcaagaacaagctgctcagcctcgaagccatgaaagttgtcaccaaacacggcaaggagacatgggtgtcaaaaggcaggacttatatgattgacaatgaagcgcacgagattgtatctcagtttaataccgaaatacgagggttctacaactattactcaatagcaaacaatgcatcggctttgggacgctctttcggctgtattatgaagttctccatgtacaaaactcttgctcaaaagctgaatatgtcagtgagaaaagtcattgaaagataccgcaaggacaatctctttgcagtaccttttgtaaacaagggaggagaaaccaagtacagggtattctataatgagggatatgcccgcaaaacggattgtgaaacagccccaagtgacaatctgccgtacatgttcaaaacgccatcgttgagtctaatagaaaggcttacaacaaaaacgtgcgaactatgtggcaagcacggagaagtggtaatgcaccatgtccgcacactcaaagagttaaaaggtaaaaatgactgggaacgcaaaatgctctacatgcacagaaagactttggttgtatgtgcggagtgtaacgcaaaaatccagagatgtgtcaagtaagatgatgttacagatggagagccgtatacatggagacgtgtaagtacggttcgggggcaggtaagcgaaaacctaccgctgtaaagcggaaaggcgttgtttgccgagcctacagataaccaaggagaaactcaaccaagacatggaaagtcttgccgccaagttgaacaccattgaggaatttaccggatgtaacatctaaagcagaacagccatgaaacgaggaatcattatcatagaggacaagaaggtcagcgtaaccggtaacgaggtatggatgaccgccaccgaaatcgccgggctgttccacgcaggcgttccggcagtgaacgccgccatcaaagccgtccgcaagtcggacgtgctgaacgactacgaggtatgccgctacatgcggcttgaaaacggtttatatgccgatgtgtatgcccttgaaatcatcatccccatcgccttccggctgaacacctactgcacgcacgtgttccgcaggtggctggtggagaaggttcttgccaaagaaaagtagcaggcatacgtgatgctcatccacaaggccaacgggtattgctgaacacgcacggacattgacaatgccgacaacagaaagaggaaacggacagctccacgaccggggttgtccgtttcctctttgtgcatacagccgccttatctcaccctttcagcggttttctataatttgcttccaacacttcgcgcagtcccgattccggataaagcacctttcctgccaacaggataaaaggcaatatcctgttattgcggtattcctgcaaggtgcggcggctcacgcggagcagttccgccacttccttgtccgtcaggtatcgctccccatccaatggcggacggtaactttccaaaaaatcggagagccatttggattccttccgcatcttttgcagcaatacggctactgattcacaatccatcgtgataacattgttgtcttcgttcataatcatatccgttttaagtcagacaaggctatctgtcagtggggcaaatcgtaccgataagcgggatgagccttttcacatcttccggcttgtagtaaaaacggaagccgatttgcgaataaccgataaagcccctgtcacgcagtttctgcaacgtgcgttggctgattctcaactgcccacaaacctcttcgcccgtgagccacttgccgagccttttggcatcccccttgcgctgcaaggcggcgaccttctccacgaaggcatccgtttgtgccaccatttcctcgaaggtctttttctcgatagatactatttccatatacaaaacgatttttgaatttgccgcaaaggtaacggcacgggctgaaacgcccatcggttttgtctgaatggcagcttgttgcgccgattgtccgggttgcggagcctttttcataaaaatcttacgtgagtcacgtagtgagttgttaaagccgcccttttccattgccgaactttgccgcagaaacaataaaacaagcgcatatatgaaagtgataacgattgaaagttccgcataccggactatgctggaacagatagcggagatagcaggatatgtccgcgaagcgaaagaagagcgacggcggaaggaggcggaaacgaaagaccgcctgctcaatacggcacaagccgccgaactgctgaacgtgagtacccgtaccctgcaacggatgagggacgaccatcgcatagaatatgtgatagtacgcggcacttgccgctaccacctctccgaagtgcaaagactgttggaaacaaataccatcaggaacaaggaagaaacagtggaagccctgctgcacaactattcgctacgcacgggaagcaagaaaaccgacaaaggaaggaggaaatgagctatggaactgcttacccgcaacagtttcgagggatggatgcagaaaatcctcgaacgcctcgaccgtcaggacgagctgctgctggctatgaaggcgcaggggcaacaaccgccgtccctgtccgaaggcatccgccttttcgacaatcaggacctgtgcatgctcctccagatcagcaagcgcaccctgcaacgctaccgcagtgagggcgcactctcctacaagaccttgggcaagaaaacctattacagcgaaacggacgtgttggacttcctttccaaacatgtgaaggacttccggcagaacgacatcgagttctacaaggcacgcatccgcaatatgttcaataaataaccaattaaaatttaatcagatggcaaagaaaaaagacgaaaaggacgtgctgattgtccgtgacgagaagacgggcgagatcagcgtggtagccggactgaatgcggacggcacgcccaagcgcacccccgccaaggcggagaacgggcagagtttcctgcaattcgaccggcacggcgacgtgctggacaacttcttcaggaacttcttccgccagtgcaaggaacccagccgcttcggtttctaccgggttgcggcagagcaggccgacaatctgctggaagtgatgaaggagctgctgaagaaccccgaagcctacagtgaactgcttgcaccccacaaggtggacacttccggctacgagcaggaagtgcagaaagtgcaggaggaacagcaacagcaaaaacaagaagaacaacaacccgatcaggaaaataaagaaaatcaggaagaacctaaaaatcaagaagaaatggaacagaaacaagaacagaatcaggaagccccgcagcagaagcagggcagacagggctaccagcccatcgacgagaacaaaatcaactggcaggagctggaagagcgttggggcgtgaaacgcgacgagcttgaaaagtccggcgaccttcagaagatgctcaactacggcaaatcagacttggtgaaggtcacgcccaatttcggcggcgaggcatttgaattggacgcgcgactctccttcaagaaggacggcgagggcaatgtcagccttgtgccgcacttcatccgcaaggagcagaaactggaagaatacaaggaacacaagttttccgatgaagaccgcaagaacctccgcgagacaggcaacctcggcagggtcgtggaccttgtggacaaggaaacgggcgaaatcacaccctcattcgtcagcatagaccgtaagacgaacgagattacggatgtgccggcaagcaaggtgcgcataccggagcgtatcggcaaaacggaaatcaccaagcaggagcaggacatgctccgcgccgggctgcccgtgcgtgacaagctcatcgagcgcaacgacggcaggaagttcgtcaccaccctgcaagtgaacgtggaacagcgcggtgtggagttcgtgccgggcacaggcaggtcgccacgtaccgcacagacgcaggaagccaaggagaatcccagccaagcacaagcacaagcgcagtcgcaaggtacggaaaatgccgccggcacgaacaaggagcaacgccgcaacacatggaccaacgaggacggcagcatccgccccatcagcaaatggagcaatgtgaactttaccgaccagcagaaagccgactacgtggcgggcagagccgtgaggctggagaacgtgaccgacaagcagggcttccatgccacgatgtacatcaagttcaacccggaaaagggacgcccgtaccgctacgacaccaatcccgacaacgcgcagcaggtcgccccaagcaacgagagccgcacgcaggtggccgtgaacaacgagggcaagaccaacgaggcgaccaagaacctgaatgagccgttgcagaagggacagaccgcccccaaggacgaaagccagcagcggcagcaggagaaaccgcagaagagaacgggcaagggcatgaagatgtaatatccccaagcccgccactaaatcccaaaaatgtaatcggtaattttgtatcgtcaaaaatcggaaaagtaaaatcgacaatagaataaaagaaaatagcattgtaaattagagttgtcaacaactaatcacaatgctatgagtgagacttccaaattacagaagtatctaatgtggtacaaagttaaagaattattttcaaatggcctaaacaagagtcaaataggcatatcattaggtcttcaccgtcaaacggtgtccaagtatctgtctatgacagaagaagagtttaagcagagtcaaagttacgagcgccgatacagccataaacttgatgattatgaagcttatgttatcggagagttacgcaaatggccatttttgtcatctccgcaactccatgaccgtttacgggaacattttacagaccttccccatgtcacagctaaaacggtatccaactttgtcaaccgagtacgtctgaatcataatctgcccaaagaattggaaaagagttaccgtccttatgagaagcaaccggaaacaccttatggtcaatatgcccaatgcgattttggagaacgctggatgaagacttcgcaaggcatacccttgaaagtatatttttttgcaatgagtcttagccgtagccgttataaatttatttatttcagccgtaccccgtttactaccgatcttgcagtttatgcccacgaacttgcctttgaatatttctcgggagtacctcggaaaatagtttatgaccaggacaaggtttttcttgtcaaggagaacctaggagacctgatacttacccacggctttcgagccttggttcgtgaacatgggttcgagccggtgttctgccgtaaatcagatcccgaaagcaaaggaaagatagagaacgtagtgaagtacgtaaagtacaattttctccggggacgtgaatttacctccatagagcaactcaacgaggaggttcaagcatggttgcaacgtactgctaacggtatggagcatcatggcatacgtcgtatcccatcagtggagttcgagatggaaagaccccatctcatgccttatcggggaattccgacaatcccttccccaaagcttttaccccatcatgtcaggaaggataacgtgattacctacaaggggaactattacagtgttcctacaggtacctaccaaggtcaccgaacacaggtatatctggaagaaaaggaagagatgctgtatatttacagccttgaaacagggaaaaatatagcagcacacaaaatctgcaaagataaaggacagttaataagtaatacctcacatcggcgagaccgtgaagctgccttggatgattacgaggctactgtccgtaaaagacttcccggggatacggtcattgatacctatttatctgaactacgcattcataagaatcgtaactatagagacaacctgcagtttatacttctccgatatcccttctatacagaacccacgttgatagaagcctttacaagatgtttggaagtgaaggtctttaatggatgtagcctgatgaaagtagccgaaagtatcagagtccacaaaggagaggcccttgtggaagttcctgtagaaacagagccggtcccatcctccgatacctcttccatggtgcccgataaaacagacatatcaacattcaataccttttttatatgataatgaacgaacagattaaaaatttatgctcgcgtttacgcttgtatgcccttccgaggttattggaatccgaagcccatattgcacgggaacagagcaagacctatgttgaatttttacatgatttgcttgctagagaagttctggaaagggatagcaaagacttacaacggcgactaaaagcagcttctctgccgtcaagacacgacctagaccttttcgaccataattactcacaaggcataaccgcaccaagactgcgtgaattaaggcatctcggatggcttgaacagaattacaatctgatactcatgggaccatccggtaccgggaaaacatttattgcggcaggacttgtctatgaagcggtatcgcaaggttacaaggcatacatggttacgatggaagatgttataaacaccattaaaatgaaaacactgatgccatctgccatgactgcctacaaccgtttgttgaaagctgacctcgtcgccattgatgatataatgctgttccctgtgaaaaaagaagatgcagcgggtttctttaacctaatcaacactctccatgagaaagcgtccttgataatcacaacaaacaaggctccgactgaatgggcaaaaactctggatgatgaagtgcttgcctctgctatacttgatcggcttttgtatcattgtgaagtcattaaactctctggacaaagctacagaatgggaaatagaaaatccatctttgacaatgataaagaataaggataatcccctttaaatagggtttggctatagtatttaattgatattattaacattttgtctcgacttatttgtgtcgattttacttttccgaaaattgtcgatttaaaatttgcttattacacccaaaaaatccgaagtaagaaaaaaacaatcaaacaacaagaaaaatgaagacaatcattacagaaaagcccagtgtggcacgtgaaatcgcccgcatcgtgggcgcgacaaagagagaggaaggttatttcgagggaggcggctatgccgtgacatgggcattcgggcatcttgtccagctcgccatgcccgacggctacggcatacgtggctttgtccgtgacaaccttcccgtcatccccgaaactttcacgctcatcccccgtcagaccaagacggagaagggctacaagcccgacagcggcgtgacggcgcaaatcaaggtcatcgccagccttttcaacggaagcgagcagatcgtcgtggcgaccgatgccgggcgcgaaggagagcttatcttccgatacctctaccactatatcggatgttccaccccgttcgtccgcctctggataagttcgcttaccgacaaggccatccgtgaaggactgcgtaacctcgaaaacggaagcaagtatgacaacctctttcttgccgccaaagcacggagcgaatctgactggctcgtgggcatcaacggcacgcaggcactcaccatcgccgccggacacggcacatattccgtcggacgtgtgcagactcccacattgggaatggtgtgcgaacgttactgggaaaaccgccgtttcactccagaagccttctggctgctccatatcgccgtgaacggaaatgataatgacggaacgatgaaattatcctcttccgggaaatggaaagagaaagaacctgcgacggcactatataataaggtaaaggaagcaggcacagccaccgtcacgaaagtagagcgcaaggaaaagacggaagaaactccactcttgttcgacctgaccacactccagaaagaggccaacgccaagcatggcttcacggcggagcagacgcttggaatcgcacagaagctctacgagaagaaactcatcacctatccgagaacgggaagccggtacatccccgacgacgtgtttgctgaaattcccaaactgcttgccttcatcggtgcgatgcccgaatggaaaggcaaggtgcaggcgaaagcgcagccggcacaccgcagcgtggacggcagcaaagtgaccgaccaccacgccctgctcgtcacgggcgagaagccgctattcctctccaaagaggacaacaccgtctatcagatgatagccggacgcatgatagaggctttctcggagaagtgtgtcaaggacaccactactgttacagcggagtgtgccggagcggagttcatggtaaaaggcagcattatcaggcaggccggatggcgtgcggtccatggcgaggaggacaaggaggaaatctccatccccgactggcaggaaggcgacacgctgacactgaagggctgctcgatcacggagggaaagaccaagcccaagccgttgcataccgaagccaccctgctttcggctatggaaaccgccggaaaggaggttgaggacgatgcgctccgtcaggcattgaaggattgcggcatcggcacacccgccacccgtgcggcgattatcgaaacactcttcaagcgcggctatatggaacgctgcaagaaatcgctcgtgcctaccgaaaaagggcttgctctttattctatagtgaagacgatgcgcatcgccgatgtcgccctgacaggcgaatgggaaaaggaactggcacgtatcgagcgcggggaactgcccgccgataccttccgcaaggagatagaggcgtacacgagggagattacctcggaactgctctcatgcgacaagctcttcgcccgcaaggattccggccgcaagtgccccaagtgcggaacgggaacgatgcagttctacggcaaggtcgtccgttgcgacaatgcggagtgcggactgcccgtgttccgtctgaaggcaaaccgtaccctctccgacgaggagatcaaagacctgcttaccgaagggcacacgaaattgctcaaaggcttcaagagcaagcaaggcaagagtttcgatgccatcgttgcctttgacggggagttcaatacgacttttgtgttcccagaaaggaaaacgaccaagaaattttcaggacggaagaaatagtgctaacttttgataagtcaggctgcatccgggcaatagaaataaacaggtttatttcgtattgtcttcgatttgaataaaatcctcacgctcacaaatgtaaatatgattttcatttgtttcgcttaatcggatttttgcgctaactttgccactggttcagagtaatggattgttcttcgataccggattacactcatactttggatttagtggtggcactcggagggataccgagtgccttttttcttccttcctcaaatatgattatcccattcattcatccactaaattccaaaataatgaacaacaagaagaaaaacgaaggtcagaccgacttttcctattacggtctgtacctgctggactacctccgcaacaaccggtttgaacaggcaaccgataccgcctttatccgtgagcgtgccgaccgcgccgccgaaacgtatgagcgggcacggcttgacggctatcctgccgagggtgcacaggaactggcaatgaacatcctgctgcgcgggcttcactactccaagcatgccatcctccgcgaagtcgtggaaagcgagtttgccggtgatgtgccggaggataagcaggaaggcttcattgccggactgcttccgctcgtcgatgcggtgttctccatttacgacctctcggacgacaacttcgccctgtcgcccgactacgacctgctgcgcacggagctgacgggagccgtcgtactttacatcgaagagtatggcgtttaaccgcaagcagagattacgggacaacatcgaggcgatacggacggcattcatccttgacagggaacagcgtacccccaccgcacgcgaaaggctgctgctggagcgttactgcggcttcggagggctgaagtgcatactgaaccccgccaaggaactgacagatgccgtccattgggcgaaatcagacctcgaactgtttgcccctacggtggagctgcacagactggtgcgcgagaactgccgtgacgaaatggaatacaagcggtacatggacgcgatgaagcagtccgtactgaccgccttctacactccgccggaaataaccgatgcgattgccgacgtgctgcacgggcacggcatacgccccgaccgtgtgcttgaaccctcggcaggcgtgggcgcattcgtggatgcggtgctgggctacaagccggatgccgatataatggcatttgaaaaagacctgatgacgggcaggattctgaaacacctgcatcccgatcagaaagtgcgggtgcagggattcgagaagatagaaaagccgtttaccggctacttcgaccttgtcatctccaacattccgttcggtgatgtggcggtgttcgacccggagtttacgggcagccatgaccctgcaaggcgttccgccgcgaagacgatacacaactatttctttctgaagagcctcgacacggtgcgcgagggcggcattgtggcgttcatcacctcgcaaggggtgctggatgccccgtccaacgcgcccatacgcgagtatatgatgaaacatgccaatccggtgggtgtcgcacgcctgccgaacaatcttttcacggacaacgcgggtacggaggtgggcagtgacctgatcatcctgcaaaagaacagcggaaagaaacgggaactgtatgattatgaggaaatgttcatacagacagggaagaccccgatcggcagtttcgagaacggatatgtcggcagcatcggcatgattccccattccgacctgataagaagtacagacccttacggaaaacctgcctataaaatcatgcaccggggcgacattgaacagatggcggaggacttgcgggagcatttaagcattgaaatgctaaagtttgacaagaaactgtatgacaggcacagtcttcatcctgcgcaaagtaaaagcacggaaggtgaaattgtctccactcccgaaatacagccgcatattgagaatgtaacgaactccgaaacggtggcaaaaccggaaaaagtaacgccacagtccacagacgaaaagccggaaatagagccacaccgcccgatgaagcattcggacggtgtgcagctctccctgcttgacctttggggaatgaccgaagaagtcagcaaggaggaaacttccaagaagaaaaaggcagcgaaaaaggaaagtgccgcaaagcgtaccgcgtccaaaccgaaagtgcaggttacaccgaaggttacgaatatacctccgcataccacctctgtttctccggctgaaaagaaaacggacgagaaaaaggaagtggaggaagcggataagcaaagcgatccagacgacatctatgcttccattaactgggaagacaatccgcccatcaacggtttctatgaaatgatgatggatatgacacctgaaaagcgcaaggctcttcggcaagtggcggaacggcacaggcaggaacaaccgaaagcacccaccgtacaacaggcggaacacgatacggaggtgaaaaagcaggaggaagtcttggatatgaaaccgcgtccctatcaccgcacgcctgaaatgcacctgcgtgaagggtcgctggtggcaaacagggcacgcgacatcgggtatctgaaagacatcactccctacggtgcgacattccagccgctcggactgacaggttatcagaaagaaaaggcactgctgtatgtatcagtccgtgacgcatacgagaggctgtaccgctatgaatcgaacagacacgaggcaaatccccagtggcgtgaacacctgaacacctgctacgatgaatttgtcatgcgctacggcaacctcaatgccaagcagaatgtgaaactggtgatgatggatgccggcggacgcgatgtcctttcgctggaacgtgcggagggcggcaggtttgtgaaggcggacatctttgaacgccccgtatccttcggggtggagtccgccgtgaatgccgggacaccggaggaagcgcttgccgcatcactcaaccggttcggaacggtcgatctcgattatatgagggagataaccgacggcacggaggaggaactgctccaagccctgaaagggcgcatcttctacaacccgctcgtaaccggttacgaaatcaaggacaggttcatcgccgggaacgtgatagagaaggcggaacgaatcgaaaattggataaatgacaatcccgaaaatgaacatatgcctaaagtgaaggaggcactggaggcattgagggaagccgaaccgcagcggattgagtttgaagacctcgacttcaacttcggtgaacgctggattcccacgggcgtgtacgcctcgtatatgagccacctgtttgaaacggacgtgagaatcgcctattccgccagcatggacgagttctcggtggcttgcggctaccgtaccatgaaaatcacggacgagtttctggtaaagggctattaccgccactacgacggtatgcacctgctgaagcacgccctgcacaacacctgccccgacatgatgaagtccatcggcaaggacgaacacggcaacgacatcaaggtgcgcgacagcgagggcatacagcttgccaacgccaagattgacgaaatccggggtgggttctccgaatggctggaagagcagtctccgcagttcaaggagaggctcgtgacgatgtataaccgcaagttcaactgtttcgtgcgcccgaagtatgacggaagccaccagacctttcccgacctcaatctcaaagggctggcaagccggggaatcaagagcatatatccctcgcagaaggactgcgtatggatgctgaagcagaacggaggcgggatctgtgaccatgaggttggaaccggtaaaacactgataatgtgcattgcagcacatgaaatgaagcggttgaaactggcgcacaagccgatgattatcggcttgaaggcgaatgtggcggagattgcagccacctatcaggccgcctatccgaacgcccgcatcctgtatgcttcggaaaaggatttctcgaccgccaaccgcgtgcgtttcttcaacaacatcaggaacaacgactacgactgcgttatcatgagccacgaccagttcgggaagataccgcaaagtccggagctgcaacagcgcatcctgcaggcggagcttgatacggtggaggaaaatctggaagtattgcgtcagcagggcaaaaatgtgtcgcgggcgatgctgaaagggctggagaagcgcaagcacaaccttgaagcgaaactggaaaaagtggaatacgccatcaagtcacgcacggacgatgtggcggatttcaagcagatgggcatcgaccatatcttcatagacgagtcgcaccagttcaagaatcttacgtttaacacgcggcacgaccgtgtagcgggattgggcaacagcgagggtagccagaaagccctgaacatgctctttgccatccgcaccatacaggagcggacgggcaaggacttgggggctacgttcctttcgggcacgaccatcagcaactcgctgacggagctgtacctgctcttcaagtacctgcgtccgaaagagctggagaggcaggacatccgctgcttcgatgcgtgggcggcgattttcgccaagaagaccactgacttcgagttcaacgtgacgaacaacatcgtgcagaaggagcgtttccgctacttcatcaaggtgccggagcttgccgccttctacaacgaaatcaccgactaccgcacggcggaggatgtgggcgtggaccgtccgcacaagaacgagatactgcaccacataccgcccacgcccgaccaggagtatttcatcaagcagttgatggaatttgccaaaacgggcgatgcgacattgctgggcagactgccgctgtcggaaacggaggagaaggcgaagatgctcatcgccaccgactacgcccgcaagatggcactggatatgcgcatgatagacccgaactacgaagaccaccccgacaacaaggcgagccactgcgccaagatgatagcggagtattaccacagatacgacgcacagaaaggcacgcagttcgtattctcggacttggggacgtatcagccgggtgaagggtggaacgtgtacagcgagatcaagcggaagctgacggaggactacggcataccggccggcgaagtccgcttcattcaggagtgcaagaccgacaaggcacgcaaggcggtgatagaggccatgaatgccgggacggtgcgtgtgctcttcggctccacgagtatgctcggaacgggcgtgaacgcgcagaaacggtgcgtggcgatccatcatcttgatacgccgtggcgcccgtccgacctgcaacagcgtgacgggcgtggtgtcagggccggcaacgagattgccaagcactttgcggggaacaacgtggatgtcatcatctatgcggtggagaagtcgctggacagctacaagttcaacctgctgcactgcaagcagaccttcatctcgcagctgaaaagcggcgcgatgggcgcacgtaccatcgacgagggggcgatggacgaaaaatcgggcatgaacttctcggaatacatggcgttgctctccggcaacaccgacctgctcgacaaggcgaaactggagaagcgtatcgcctcgctcgaaggggaacgcaagtcgttccacaagggcaggcgcgattctgagttcaagctggaaaccaaggtcaaggagctgggcggcaacacggcggccattgaagccatgacagaggactggaacaggttccttgccgctgcccggacagacaaggatggcaaccggctgaatgcggtcagggtggacggcgtggactccaccgacgagaaggttatcgggaagcgtttgcaggagatagccaggaacgccactacgggcggactgtacaaaccgattggggaactgtacggcttccccgtcaaggtggtcagcgaaaggacgctcaaagagggactggagtttacagacaaccgcttcgtggtggagggaaactacaagtacacctacaacaacgggcatctggcaatggctgacccggtagccgccgcgcgcaatttcctgaacgcgctggagaagataccttccaccattgaccagtacaaggcgaagaacgaggggctggaaaaggagattccgcagttgcaggagatagccagcaaggtgtggaagaaggaagacgaactgaaacagttgaaatccgaacttgccgcactcgaccgcaagatacagctggaactggctcctcccgcaacggaaaccgccgaaaaggaaacggagggtcagcaacaggcccgaccgacattgggagatgttacgcaggtacgcggtacggctgacgggcagcatcctgccggtgaaaacattgcagaccggttctctgccgtacggccgggatttcagcccaaggatgagcaccggatgaaagggataaagatgtaggcccgattcttgcaagccggtcgcactgccatgcagaacgtgatcggcttgcctgtcgtaaaagcggaaacatatgggaggaaactatgacaaaataaaaaacagaccgacctgtcggtttttccgtttctttgtgtatatttgcgaccggacggcatcctgaccgggaatacggacactgaagaaagaatgagattcaaagaatagaaataaccctaaagacaattgaagtatgaaacgaatgaactgttattttctgctgttggcagcctcgctgtgcgttttaccgctccatgcacagaaagaatactcgatagaccgtatcacagccataaatctgggagacggccgtattctccaccgggaaatttcgggcgacaagcctcttgacggagagcaccgcattatcgacggctaccattccgcctatatccttgcccgtttcaaggacggtctttacaatggcgattacgaagaatacatctacaacaagctgaaagccaagggctcctacaaggagggttggaaggacggaaccttcaggaaatatgacgacgaaggcagggtgacggaagagaaatcctacaaatccggcaaactggacggtgcccaccgcacgttctacacaaacgggaaactggaaatggaacgcttctacaaaggaggaaagcaagacggaaaggacgtgtactacgagtttgacggtacgctgcgcagggaacacaactataaggacgggaagcagaccggcaagcagtattcctacatcaagggcacattcgagctgaaagagacctcttactacaacgagcaggggctgcttgacggcgactttgaacagctttacctgttcggccagccccgcacaaccggccattacaaaaacgggcagaaggatggaacctgggtgcagatagcggagagcggcgacaccctgcacatcacaacctatcgtgaagggaatgaagaagggcttcaggtccgttttgacagagagaccggttcacggctcaaggaatattacaaaaagaacaaccggtatgacggtctttacagggagtacgacccgtcaaccggagaacttgtctatgaggcaacctacgagtttggacggctcaacggcaaggcgaagtcactggtgcgcgacaaccggttcgactattgggaaaccagcacttacgtcaacggacgccagaccggtcccttcgagtcgcgctacgtgaagaacgacaaggtaagagaaaccggaacataccgcaacggtcaccgcacgggacggtggaaacgctatgacatcaacgggaagctggaaatggaatgggaagaatagaggctgcgggtgtccatagcgggcagtcctgacagcagggtctgggtatgcagaaatccgggggggatgaaaataaccggtacggagaagggaaatccccccgaaatcactatcttcgcagaagaaaaccaatggatatagaaatatgtttaccaacagggatgaagtactggaaaaggctttgcggatattcgcaaagatgaattacgagaaggcaagtcagatggagattgccagaacctgcggactgtcgaaagcgggactgacctattatttcccgttcaaactggacctgtttatagctgtggcagacaggtacgtgttcgatacccagcatactaaaaacaagttcaactttacggcaaactcgctggaggaatttattgaccagtatgtagccggagtggagaacacgaggcagaggctcgtacgactgctggacgacggggacaattccggcgggtgcagtgtcaacttctattattaccacctgctgatgcaggtaaggatgtactatcctggcgtggagcaaaagattgctgccatattcagccagaaccttgaactgtggaaggctgctattgaaaaggcgaaagaaagcggggaaatcaggcaggatgtggatgtggatgaagcggcttcgatgttctggcagatgttcttcggaacctcctatgagctgtccttctttcaggggcttgacacccggaaactctcacgcagcctgcacttcctctattcgctgctgaaagcctaaggtacaggttgcaggctgtacggaacggcggacgatacccaagcgagggactttaacaaaataaaaccgaccaacctgttggtttttctgtttctttgtgtatatttgcatctgtatgacatcacattcagtactatggatcatgttcggaaacagagaggaagcatcgtgctgtataaggaaaaacgcaacggtgcggattacatacggatagagtatgctgacagcgaggctgttggcatactgctctcgcaagatgcggaaaagacaggcgagaattccgcctgcatccctgctgccgctttcaggctgcctgatttctacgaccgctattcgccccacgcctacatcgattacagcagggtttatgtgaggcatcccaagccccaaagggaatacacactgccggaaggctatctggaactgctggagcagaagcgttacagcccctcgaccattaaaacctatcgtgcctatttcagcgactttatggaataccataaaggacgcaacatcgaccgcctgaaagtggcggacatcaacaaatacatcctctatcttgtaaacgaaaagaaaatctcggtatcgcagcagaacatgcgcatcaacgccatcaagttctactacgagcaggtgaagggcggaaagcggcaatactacggcggcatcacccgcgccaaagagtacaagagcctgcccgaagtgctgagccgtaatgaggtatgccgtatcctctcgtgcctgtcgaaccggaagcaccgctgcatgatctcattgatatactcagccggactacggcggagcgagctgctgaacctcacccccaaggacatcataagcgaaaggatgcttgtacgcatcatgggcaaaggacggaaatgccggtattcgctgctgtcggaaaaactgctgaaggaactgagggaatatttcaaggagtaccgtccgcagaaatggctgttcgagggagagacacccggagaaccgtattccgccagtgcgctggtaaaggtactgaaagaagctgccagccgtgccggaatcaagcaccgggtacatgtacacatgctgcgccattcgtttgcgacccacttgctggagcaaggaacagacctgaggaccatacaggaactgctgggtcataatgacatcaagaccacatctatttatcttcatgtgacgagtacacacaaatcgagcatacccaatccgcttgattctctggatgattcgtagggtgcattatcatattatgaaggagaatacaaattatatcgtatctacaaattaccatatatgataagaatgacaagacatatcaaaagcatgactatcaggagcggattgattaccctcctgttgttgtcggtattgttgccaacagtcagggccaatgtctcggctacggcagattctgtgtattttcacataaagttggacacgctgggaattcttcgcaccggacaggaggtgaaattgacgtatgcactggtcaattcccaattcgattcggttgcagctcctgagtttgacagtagcatagaagtgctacgtggtccggagcctcataaaagcagcagttatgccatcataaacggtgtggaaagcaagacaaatgaaaccggattctgttattttgtacggtttagggaaagtggtgagtttcaactgccaccggcatccgtaaaagtagggaatcagacctatactaccccggaatgccgtgtaaccgtacatactcccgaagcagatttaagtaaattgcaatgccatctgcgtgtggctcaactgaaaaaggattttgtaaaatattgtgccacgttgacttgcaatgcccgtcccgaccagaatccgcccctgttgaccattaacggagagacagtccgtccgacaagcaactcctattcgggttccgatggcaaggaggaatatgtttacaaatattatttttccagcaatggttataacgtagcctgtaaggaactgacctttggcggaattccttattctgtagagccgcgagtgtgcaaaatagacaatgatgttttcaaccttattgtctttggggttgtatgtgcattgttcgagttgatatggtggcttgcctatcgctaccgttaccgggaggagaaagatgccgcccttgccgactttgtgttgaaaaggaaaaccttgcctcttattattgactgggcatacacccattatggggcatcgcacatgctgatgttggtttctgtgatatctctgagtgttatgggtataatgttctatacaaacgggcagttcgtgtctgcttttctctggtttggcggtgtattactgctgcttgcctatgtgctataccgaagtcagaggcgcaagttggatttcagtagcatacctacggttactgggaatatgtaaacaggtttaaacaaaactataataaaatgatgtggtgttctgaaaataaaaagaagccgcctggtcgcattcttagtatggcagacaagggaattattttctttctttgcattaacgtacttacaatgctaaatgtcatagcgatgataacagttacaggagcctgtgacctgttcaataatgaaatagtgtggggattattattaatcattggtggttttattatatattttactcacaatgtctttatagataggaaagataaatatgttacctatttcaagaagttcgggaaacagaaattctggaagctatttatttggtatgtgctatcttacggtatggctatagcttgttactgtttcagcttaaagcttattttgatatttcttaaataacaggaagaatatttcgctaacaacgcaggataacggacaagccgttccctgctgaaccattacagacaacttaatacagaaatatatggaatatataccggattatctgaaaccatttattatacacaaagactatttttctgaattgatagaagattcatggtttaataatcctgtgtattggaaaggtcggttaatatcaccgcaaaacgaaacaaaattcaaactttacttttgtggtgaattaattgataattccattgtaggcaagcaaacttcacctttggcaatatatgcggattcagtacattcaggagaaaggattactctttttgatgaacggtataatggatatgaagcattacttatagaggataatagagaacatccattatctcctgagattcagtttgtagataaagatgctgaaacagaatttgaaattatcattcttggatgcagtagtactgatttcgatgatgaatatcccgccaccgaacaagtacgactaatcaacggcgactgggtaaacaaagagtatctgaaatgtaatgcttttgatttcatttcaatacttattcgcaatgccaaaggtcaggtatatacgatattggaaatggaattatgttagttaaatcgtctgtaacaaggtcgagataacagctgaacgctgtccctcaccaacccattagcaacaatataatcaacaaatatggaacgaataagaataacatcggattctccgggatatatcaaggtttcggacataggcaaggatttgagaaatttttcgagaataatagaaacgaaatatagtgaaatagactttgatttcttattttgttttagggcattatattccactgtaggtattaggtcgaaagtgagatatgaaaaagatgttaatatgttgggtatggatttaataatgtcactatatgaatttaatccgtacaaagagaatgtatctatgcagcggagaataatggggaaacacttcttcccatttttctctgctaacatacataaatacatatataaacttcccgttctcaaatcagtagaaaaagaattagtagaggatatgcgcttattccttgtcgaaaacttatggctaccaaacgaaaacggacaatatagactatctgtaatagaaacttcgtcttatgaacattgcataaagttgtttggcaatccgaaagagaaaaaatttgcagacaatgaacaaggtataaaagttcaagatataacttggataatagacgatgttaaaagcgaattgtctgcaacatatttgttgattgataaaaaatggcaattacaaaaatatcaggtgagaattaaagaggttgctaacaacgcaggataacggcaagccgttccctgctgaaccattataaacagtattgattgaaatatgacgaaatccaaattcttttatatcattctctgtattcatctattatctggaataataggattgataactttgaatttaataggtaattgtgaccggttacgctggaatattggtgatattcttcggttattgtttttccttactcctttcgtcctgatgttctgtgttcctaaaaaactacctacatggagcaaagtctgtatgcgcatttattttggagtatatatatttccattcgtcatttttcctccattatggtggtttctattcaactttgacactgctgtagctgaaaacaatcaatatataatccgtcaatatagatatggaggacgtgattattacgagcaaaaaagtatatataaaaaaagtggaatcttagagaaatatgtagggctttttgacagctctgactcttatagtgagttaaaccagttggattatgaaataaaagaatttaagattgataacatgacatttacaggaaaagtgctcttgaaacgaaatgaaaatgggcaagttgtaactaaagacacgcttattgtttactcgatatacgaaaaagaagcacctatgtaattcagtttataacaaggtcgagataacagctcaacgctgttgctcaccaaaccattagatataataggcatgagaatatttgtattatattgcttgttctttttcccacttagctatgttatagcaaaaaacggctatgtggaacaaaattcagcaaagtatcattctttgactgaaaaagataccctttatatagaaacagaaaaaacagaatttgaaattctatataggctatgttttaaccagcaaggtaaaaagaatgttgtttttgaattgaaagcggtagatgatagtaacattgacttcgtgcaaagctatgcaatcaatggagtaaaaaagtttgattgctttgccgtgtatgataatgtggcagacggaaaccgtttcttattctttgactatgaaagtcaaattgcttacataacgcctacatgtttttccggtttctatccgatatacagttctgtggacttttcaaaattagaagtcttattacgaaatgaaccctcccatttgaaacagctaaacgacacgttaagtattgatagtaaagtggcttatgtaccatttaactgtaataatcgaattataaaggcgacttttgttccatgttcccaaacgggaaagggcaataaatatctaacaacgaaagatagcatctaacgatgctcctttctaaccattaccgacaacgaataaagttatagacatgaagcatatgcaaatgataataacaatagtgtgcatactttatgtaaccgcaagttgtacaacgcaaaaggttgcatatagagaaaggtttgaagaagcaaaaggatatgccctttatgcttgtatcgcacacatgaacaagtttgttgatagtacatcagttatcaacaaagattattctggcgaatattttgttcaattaagtagtttatcgctggaagaaattatcagaattaaggaatatgtggataaagaatgtatgaattattggagtatatcacacaatccggaaggtaatatgattgcatattcaacatggaaattctataactccaaagacttggataactttattcataagacattaaggaaaaatatcggtaacaacgaaagatagcatctgacgatgcccctttctaaccattaaaggcatgaggaaattattagagaaatattacaacatcaattattactgcacttataagctgctgtttttcattttttggaggatgctaaaccctttgtattggctaagcctcttgaaatgggacaaccgctacataaaatggttagtttcgactggtaagaaaatagaagaaggcggaatggataaaggcatctatcttccttacagcactatggcacttagcaccccatgtttcatcagcctttggatatgttgtcttgtctgccttgcttacatcaagattttcaggataagcctattaagcattttgggaaacggtgtctttattttgcttttgatactcatcgggatatgcggatattacgtcaatgagatattcttattaaagggggacaaatacaagaagtatttcgccgagtttgacaaaaagaaaaagtatttgctctattacagtatctatgtcgtttctctgattatccagtttgcaaccttttatttgttgtttagtagtgtatgaggaaattctaattgaaaagtaaaaataattatgagctatattgaagcagaacgattgggaagagttcttatatgggcatggaacaagtatgtgaagaaaactgccattccttacaaggagattgatttccattattcggattgggtctttctcctgacagggcttgtcttttttggaattgcgctgggtattatcctgctttattttgcttttataagataataaaccatttacaatgaaagtgaagttaaaatacccgatattcagttttgcccccaaaggcaacatgatatacgtgtttcgcaaggaaaaactatacacaacgaccaataccgagttgttgaagaagcggaagaactacattgttgtggatgcaaccgggacgaaatatgttgaaaagggggcgcacaaagtgaagtggcaagggatattcggatattgcatcaggatgcagggacgtgtgatttccattgaatacgagtacggggacaaccccgaaccgttcccactacgaaaactgcaagaactggtagcggaacgataccccaagacacggtggttcaaggaagaatgctggaacagcgcagacgagttccggcaagcgattttcgcctgcaagacctttgaggaagtggcggacatactgatgcccgaacgaaaaacgagcgtttggcagcgcattgaagaatatttcctgcgggcaggttttcttatgcttgccgccatgttcctttatcacgtggtttggcggctaatccaaaagttttggctatggattgtaggatagaagattgagcatatgaggacaagagaatattcaacagatgagttgttgctaatcgccaataacgtgacgggcgaatatactgacaagcaggtgcggctggcaaagatggaactgtataagcgtggagtggatgacaaggtgatagccgacatcatggaagagaaagaggaagccttcatgaaaagactggatgctgccgcacgtgcggagaaagcccgtatggacaaacagaacgagaagaacaggaatgtcagttaccgatggtgggaactgataccgatgcttttgtttgccccgttttatctggtgagaggcgaaaaggaacttgtggatatactgttgtttcttccggtctatctactcagccggacacccgttgatttcagcggtctgtttcccgaattaagacggttgaaggaagaaaaatacgatctgaaattcaagcaacggcttacagcactgattttcggagatgcaatgtatttcttattggtctattatagcttgctgaatgacgaagtattatagccattgaaatgagaaggattctcccgaaactgttccttttttactgaaaagcgcacttctgttggagttttcggcaagatttggaactgccgtaaccgcaggatatgcgaactttgcatcaaaaaacaacagcaatgaaactgacagatcttttaaggcggacagccgaagcaaatccccaagccgccaccctgcacagcatcgcagacaaggcagaagaactcgtagagaaaaggtattccgtgcggagaatgctccgcgaaatggaaagtttcgcacatgatacggaagcaatgcgtctgacagtggacgcattgcggcaactcccgtatctgcccacactggaacagcgggactacaagccctatatggctctggttgcctgttcaccggaaaattttgcctattgctacctgagcaacgaccttgttgccgtctatgaggcgggataccggacggcagaactgatgtttttctgcgacctgctccgctgcatgaggggacgctcctatctgaactgcgtgacaaaccgggtatgcgactatttcttcagggcacggcgtgacgcgctccgccatattgccacaccgctgaaagaatttgagatgcagtatgcggaaagccggatgaaggaactggaaaaggccgtattcatgctgaaagtgaaaatgtacaaatggcatacattcacggctgaaaacatggcacgcatgtgcggcatgagctattcccatttccgggagagattcgagacatactacggctgctctgctaccgaatggctccggcgtgaacggatctgccgtatcatggaagacatgacctaccgtcccgaactgaccctgaaggaagtggcagagcgcaaccatttcctttccaagagcaacttccacgatttctgcctcaagagaatgctcaaaagaccgggtaaactgaaacgggaagggtatgaaaaatggtgtgagagaagactggcttattacaataaccactcccaagcgtgttaccgataatgacaccccgaagcgtacatgagactataccgaatactgatagcagcaggctatatatccatattcctgctggtgctgctggctgcatatatttttcataacgaacagcatacactggaattgcttgaacaaaagaataatacaaccaacgggctgcggaagagcatcaaccggctcaacatgcaaatagccgggctttcatttctcggagaaaccgtcatggaatggacggacagcgacaaggaagaataccacttgcagcgtatggttatcgacagcacgctgtgttctttccgtaacgtgttccgttccgaacagaaaggaatagacagcctacgcaggatactggcaaacaaggaatcgcagctgaatgatcttgccgcactatatctccggcaaaagaccctccacaggcagatagccgacagagtgcccgccatagcacggaagagtgcggacgaagccgcccgcaagccgaagcgcaagggatttctgggtttgttcggcaagaaagaggacggtacgcccacatccgccacggccatgctccactcgctcaacagccatgtgatagcggaacagaacctgcaggacaggttgctttcggagcagaccgacagacttgccgggcggaatgcctcccttaaccggcagttgcaacagctggtccggcagatagacggcaatgtgcaggaagacctgcaacggcaggaagccgagaccgcatccgaaagggaacggattttcatgcaaatcggcggactggcggtatttgcccttgcgctattgctggtgctctttttcgtgatacaccgcgatgccaaccgcatcgggcaatacaagcgcaggacagccgagctgatcggaaagcagcaggaatccctccggcagaacgaggcactgattgcctcacgcaagaaagcggtacagacaatcacccatgagctgcgcacccctttgaacgccataacgggctacaccggactgatagagaaggaacacgacccggagaaatccgcaaaatacatacggaacatccgtcagtcttcagaccgtatgagaggaatgctcaacacgctgcttgacttcttccggctggacagcggcaaggaacagccctgcctgtccccctgccgtatttccatcctcacacaaacacttgaaaccatgtttgcacccgaagccatgaacaaggggctggctctggaggtggagaaccgtgcggatgcctttgtcataaccgacaaggagcgtatcctgcaaatcgggaacaacctgctatccaacgccatcaagttcacggagaacgggtatgtctcattgctgacagagtatagggacgggatgctggcattgacagtggaagatacgggtacgggcatgaccgacgaggaacaacagcgggtgttcggagcgttcgagcggctttcgaatgccgccacgcaggacggtttcggtctgggcctctccatcgtgcgccatatcgtgagaatgctcggcggtaatatccgcgtggagagcgagaaagggaaaggaagccgttttatcgcagaaatacccgtacatatcatcgaagagacatccctgccggatgtggagaaccatgcccgacgcaccccgctgtaccgggatgtcatagccatcgacaatgacggggtatcccttcagatgatgaaggagatgtatattcatgagggtgtgcgttgcgacatctgcaccaacgtggcagaactggttgagatggtacgcaggaaagactacagcctgctgctgaccgacctgaatatgccggagataaacggcttggagctgctggaactgctgcgttcctcgaacgtgggcaattcaaggaccattcccgttgtcgtgacgaccgattcaggcagttgcgactcggaggaactgctgtcgcacggattttcgggctgtcttttcaagcctttctcgatttccgagctgatggcggtaaccgatcggtgtgcaatgaaaggggaaagatccgaaaaaccggatttctcctcactgctgtcctatggcaacgaagcctccatgctggataaactgacaacggagactgaaaaggagatgcaggcactcagggaagcgaaatgccgaaacgatgcggaaggtctgaacgcccttacgcatcatctgcgcagttcgtgggagatactccgtgcagaccaaccgctaagggtactttacaggctgctgcacggtgaagacactccggacaatgaagcattgtcccatgcagtgaagggcgtactggacaagggcgcggagattatccggctggcgaaagaggaaaggaggaagtacggtcatggataagacaagggttatcgtagtggaggacaatatcgtatattgtgagtttgtctgcaacctgctggcacgggagggattccgcaccgtgcaggcttaccggcttgctgcggcaaggaaactcctgcaacaagcctccgacggggacatagtgctttcagacctgcgcctgcctgacggcaacggcatagacctgttgcggtggatgcggaaagaagggctggtccagccgttcatcatcatgaccgactacgccgaggtgcataccgccgtggaaagcatgaaactcggctcgctggactatatacccaagctgctggtcgaggacaagcttgttccgctgctccgcaacattcagaaagaacagtacggcagacaacggcgtatgcccgtgttcgcccgtgacggctcggcattcagagccgtcatgaagcggataaagttagtcgccccgacagaaatgagcgttctgatactcggcgagaacggtacgggcaaggagcatatagcccatcacctgcatgaaaagagcaagcgttccggcaagccattcgtgccggtggactgcggttcgctctccgtccaacttgcgccgtcggcattcttcgggcatgtcaagggcgcatttacgggtgctgacaacgccacgcaaggatatttccacgaggcagatggcggtacgctgtttttggacgaggtaggcaaccttgcattggaaacgcaacaaatgctgcttcgtgccatacaggaacggcggtaccgtcccataggcgacaaggcggacagaaatttcaatgtacgtatcattgccgccaccaacgagaatctggagaaggcggtaagcgagaagcgtttccggcaggatctgctgtaccgcctgcacgacttcgagattaccgtccctccgttgcgcgactgtctggaggacgtcatgccgctggcggagttcttccgcgagattgccaacaaggaactggagtgccgtgtggaagggttcagttccgaagcccggaaagcattgctgtcatacccatggccgggcaatgtgcgcgagctgcaacaaaaaatcatgggagcggtattgcaggcgcaggaaggtgcggtacgaaaggagcatctggaacttggattggcggaaacatccgcttccgccggtttcgcactgcgcaacgatgcggaggaaaaggaacggatcatgcgtgccctgaaacaatccgggggaaaccgatacaccgccgccaaaatactgggaataggcaggacaactctctataaaaagctggaagagtatggactgaagtataaatttgagcaatcatagcccgcaattcattggaaatggctatatttgcatgacatattagaaggtaacggcgttttggaaagtccatccgccgcatatatataacataagaccgcaaggcgtttcgagcgaaaatctggtaaattgacactacggagacgattgcgtgaagcttatgctatgtctacgcatagcgtgcattcacgtactctccgtaaaggctttaccagagccgtcgcttgaaagtagtgtgtttgcacgctgcttttttgcccttgccgaacgaaacgaaagggaacgattatgggaaaagttcaggttcttgccgtcctctcgatggacgggtgtcttgcttccgagttgcatggcaaatcgtataaggaactgcgccttgacagttgcggcatcaatgagataagggagaacgccctttatcatatcacaccggattactccatctccatgctggaggaatggagaagacatgaaacggatacctgctatctggcggaagcctctcccgaaaagacagattatatcaacggactgctgcgtatgcaggtggtggatgaaatcatcctctataccgttcctttcatagccgggacagggaagtattttttccggtctgccctgccactggtcaaatggacgcttgtattacaaaagaaatttcccaatggcgtgacctgccacatctatcagcgtgcggcttccgaaaaaacagcctgaaggacaccccgccattccattttttaagtaccgaaaaagtacaaatgttcggaaagtgaacacttttgtttgattataaatcctgtcggaatacaaatatttattttaatatcgctgatagccagcagattataagtatatcgccggagaatctgtccgttttgacgcactttttgccgttcatattcatgtgcgcaccctaacatcaaaatgttgaatttcaaaattgacaggatatgaactatttcttactggcggataccgagttcttccgccgtatcaatgaagccggagattgcaatatggaaacggcatatatggcttttgccaaccaagtaatcgaactgtgcagcagcatgaatacgagccatgccatcatcgcgctggcttacattgaaatcgagttgcaacaccaccccatgcgtgtgctttccgaagaacgcaaggaagccgccgcctatatcggaaaggcactctctttcgtgaggaagatgcaaaagttccttaccactccccaagtgccgccactatcctatctcccttcttcagccgaaacgccatccgacaatcccgctccgccgcttcaatggacgggcaatgccatcgaccttgtggaacttatttacggcatctatgagatgggctgcatcaacaacggtgaaatgccgctcaaacagcttgccccgctgctgtaccggatattcggtgtcgaagccaaagactgctaccgcttctacattgacatcaaacgcaggaaaacaatcagccatacgcattttctcgaacaaatgcaggagaggctgaacgagcggataagaagggatgaggaggcggaattgaaaagaagatagctgttcttgagaaattcccgtccattatctgaataaaaagcaacttatttcttgtgcgttacgcaaaaaaggcttacttttgcaaatgaattaagaaagatatgcggctcagaccgtgttcaacgataacagtacccgtttggcataccgtaagatctgccggcgggtcattcttttttataacggtatggcaaacaagaaatcacgttccattgaagaacaaatagaactgctcaaacaaagggggatgattgtcggggatgaaatttttgccgcccggcatctggctcatatcagctactatcgtctgaaaggctattggtgggatatgcagtatgacaagacccgtcatctgttccagcctgattccaatctggaagatgtcgtcacacgctattattttgataaagaactgcgccttattttattcgatgccattgaaacaatagaaatcaccctgcgtacaaagatgatttatcatctgtcacaatcttacggagggctctggtattgtgacccggaactgtttgcggatgccgctttccatgcccggcacctcaaagaactgatggaagagttcctgcggagcaacgagatattcgtgaaagactacaagcgcaagcatttcattacgaatacagacggagaaaggatacttgacgaatacccggatgcgtggattatatttgaggtggccacgttcggcacactttccaaaatatacaagaacctcaaccaccagttgcccgaaaaatcggcaatagccaatgatatggggctaaatttacacaatgaactgtcgggatggctggaagccatttcatacatgcgcaacatcatcgcgcaccattccagagtatggagccggaatatggtcaaacgcccttgtgaaatccgcaatccgcgaatggcatggctttcccgcccgttgaccgaggtacagcagaaaaaaccgttctatgtgattacagccatgctatacctctgcaatgccatagacgagggagatacgttcaaggagaagttactggcattgtttaaggaatatgcggatgtgcccatctacaaaataggtttcttcaaccgttgggaagaggaaccgatctggaaaaagatgtcagaatagaaccatatggcgaagaagaagaaaaaacagcagggacactattgccgtatctgtggcgactacaaggcgaacgagaaattcagcggaaagggacacacccggcatatctgcaagagttgtatgtcagccatgcgtagcggcaagaatccggaggatatttttcctgagccgttacccgtgaaccgtgaaactatacgtttcaataaactgggcaaagaagaaaaagccgtgttgaaagcgtttatcaccgaagccacaaccgaatactggcaggaaaacagacagataccgtttgcggacagtttctccgaactaaaaaaatacatcataggaacttatgatgaagaatgcggcatacttctgaaagatgatgccgaactgaaaaacgactttcagacccatacgataacgaccataaacaaattgcttaaggaggaaatttctgaaaatcaggattaagacaaagggcggagcaaggtatcaaacttgcaccgccctttgttttgtaccccgtcggttatttctgctgtaacagatgtttcaggttctcgtcacccgcgattcgttccagctcgtctttcacgatttgtttcacttcctccttgatgcgcctgtaattcgcctgcaccgtttccttcatgcagtcgttgccgtcctcgtccgtgaagtcggtaatgacgggtatcttcttataggctttttcctcacgcttcaccttttcggcatccacgacaatctcacaatggaaaatcttctgctcaatgcgctcgttgaaattgtcagacaccgaaccgacaaacattccctgcgtcaagcccgaaatcttgctcggcgggataagcgcatccatctgcgtgttgatggaggtggaaacgtcctgccggttgatggagatggactgccttttctgcaacacctttccaaagcgttccgaaagcgtcttggcggtttcgcccaccacctgaccggagaagatattgccgacggtgttcatcacgactttggcttctttgtcgccatagtcgcgcaccaactggctgaaatcctgaaagcccagacacaccgccaccttgttgcttcgtgcggtggcgataaggttgtccaaccccttaaaatagattgtgggcagctcgtcaatgataaccgatgacttcagcatccctttcttgttgatgagcttcacgatacgggagttgtacaagccgagagccgccccgtaaatgttctgacggtcgggattgttgccgacacagaggattttcggctcttcgggattgttgatgtccagcgtaaactcgctgtcggacatgacccaatagagctgcggggaaatcatcctcgacagtggaatttttgccgaagcgatctgccccatgagctgttccgcagctccaccgagccacgcatccataaacggtgagaggtagttttccagttccgggtaagaggtcaatatcggaaaaatatcctcataacggcggttcaggaactcaatggcatgagggaacgtacagtatttgccgttctgatagattttcaaataccatataatactggcaaacaaaatgataggtgattccacaaagaagtcgccctgcttttgcacccaactcttattgaggttgagcatgatggtgtacgcgctctcgtaagcgtccgtaatatcctccataaaatccgggtgtatgggattgcagcggtggctgcgtcgcgggtcatcgaagtttatcacatagaacttcggcttcaccttgtatccctccgggtggttgagcagatggttgtaggcaatggtcgataagtcactgaatttgaaatcatagacatacatcgagaagcccttctcaatctgctgcttgatgaaagagtttaccaccgcataggactttccgctgcccggcgtgcccaatacgatggaggcacggaacgggttcaccacgtttatccagccgttgttccaacgcttcttgtagtagaagcgagtgggcagattgaccgaatactcgctttcgataagccgtgtttcctgcatgaagctctcgttctcgttgttgaacacgtcatccatcaggttgtgtttcagcaggcggctcatccacagaccgcccatcatcaggcagacatagcctgtgccgatagtaaggatatacagagccgcaaccgcttccaccgggagcggcaaagccagtatccaccagttcaggaaaaagagcacgaacccggcggcaagcaccgcccatatcttttgccaagtgattttctctcccttgactccctttgtgcccagacaggacagggcaagcaggaggacggcaaacagtttcgtgtagaggatggaatggaacagccccgccgtgcggtcaaagttcatcaggattttatccaccacgccgatattcacgccccccagacttatggcttcatagcagaaccagtacacgttcataaccactaaaataatactcactgcacgcaggaaatccatgattttcgccagtgccctcaaatcgtcttcttgttgtgacatacgttgaaaatttttaattgttgaaacttctgttacattctcaagcccttgcgcttcttctttttcttcttgcgccacatcgcccggatgaaggcttcctcctcggcatccactgccggaccttcgggagagagcaaacccataccgccatccgtgtcatcatgcccggaaacggccagcccacacatatcttccccattttccaccggaatggaaagcgtgagcggcggctgtccggcataaggcagcgtgaagtgttcctgcaaggcattggcggaaagttccttgcccatgcgtgagccgttcagtacacttcccgtgcggtggtcgatgaaagtggctccataaatgcgcccttcctccgtatggcgcaacaccgtgtcaatccctttctccttgagccgggaaacgaatgtttccttgtcatacgtatcggcgagaacagaaaggacggtgcgtttcgtcatttcggcgagtttcctgtctttaatctcctgtttggaacgggcaaacttcctctctacggcttcatagccggcagtcttcccgaagagcgaagacttgaaagggttgcccaccttgttccctgcatcatcggtggcagaataaaccagcccatgatactcccttccgcgtacattgccccgcgcttcctccaccgtcacattatacaaggaaaggagggcacggtattcacccttcgtttggaaacagtattgggcgttcaacgccttgaccgtgttccctacctgcttcttcacatcgcctgccgaagcgtccaccttgtgcagcggtgtatcaagacgacggttccggcgttccgcatcgtgaagcccgtacttctgttccagctcacgtgtaatctgcttgctgcggtagaaattgtttcgggtggcgatgctcctgccgttttcgtccaccctgaccgtcacgatatgcaggtggtggcggttgatgtcctcgtgtttgaacacaagatacggccggttgccgtagcccatcttttccagatactcgcgtgcgatgtcctgaagctccgtgtcggtcagcacatcctccgggtgcgggttgagagatatatgcaccaccggtttctccaccctcgactgtgcgggcatgaaggatagaaaatcctccatagccctatggatgtccaccgttcccgaaccgtcattgtagatgcggttggcggtgagcagccgccctttcgcttcgttaatcttctccccgttgtaggcgagtgcgccgtacaacgaatttcctacactgatttttgcgaccatttcgcctccagctcttttgaaagttccacaatccggcggctcagtttcacgagttccacggtctgcccttccaatttgtagagcaacgccatcgcctttttctcggagaaatggcaacgcaattccttcacgacttggttgtagttcgtgccgacagcgcggaactgcgcatgaaaatcagacagcttggtgtagtagtccaccagcgttttgtccactttcagcaccttgaaaggctgcccgaagaagtgcgccttgatgaaaaccgacttggcgtaaacgcccgatttctcgaacatggagaggaaacggttgtgttccgccccgttgaagcggacggtgtagcggtacaccgccggatcaattttgggatttctccctgccttactttttttttcactcatataaaattggatttagcggtttgacggcataagccgccgcttcggggcacagataccgcaggtttgaaaggcttcccgacttcggaggggaagcccgccccctgcaagggcaaggcgttttccgggatgctcaaaatattttgagcggctgaaaacataccttgctatgttcaggtgaacataaaaatccgcctccggacggattgggggaatgcctttcaaactccgggctgtgccaccgactgcgtaccctgccgttcgggtgcaaagttagggtgataaatccgtgtctgacagaggtataagtgtgccgaatggtgccaatcggcgcaacatgctgccacttgccgaagaagtgatacaagtactgaaaattcattgtttatttgcagcgtgattcggatgtgggactgaaaatacactccttccgccagatgttcggacatcaatccaaacggatgaaaacaggtgtacatattcagccggttttccaagcacacgtccatgcggacggataaaggcgtgggtgattggacagaccgatgaatgcccgcaggcacagccggattaaagagtgaataaataaatggaagtgcgtgcgtatgtatgaatggcaatacgctaccgctaccggacagatgtataaccaaataaattatcagacaaatgaaagaagcaacttatgtggcaatctccacgcagaaaggtggagcgggtaagacaaccctgacagtgcttgtggcaagctacctgcactatgtgaaaggctataacgtagccgtagtggactgcgattttccgcagtacagtatccatgatatgcgcaagcgtgacatgaaagccgtcatggaggatgagcattacaaggtgctggcgtatgagcagctcaagcggctgaagaaaaatccgtacccaatcagatgcagccgtgcggaagacgcgataagcaccgccgaaaatctggtagaagcgcagcccgacctcgatttcgtgttcttcgacctgccgggaaccatcaacaacgctgacgtggtacagaccatttccaaaatggactatatcttcacgcctatcatcgccgaccgtgtggtgatggagagttccatcaagttcgccactgtcatcaacgaacagatgataagcacgggcaagtccggcatcaaagggatttatctcgtgtggaacatggtggacggacgcgaaaagacagaattgtataaggcatacgacaaggtctgtgccgagttcgccctgcctattttggaaacatacctgcctgatagcaagcgttttcgcaaggaaacggcggcagaacgcaaggcggtattccgatccacagccttccctgcggacaagatgctgatacgcggcagtaaccttgacaaacttgcggatgagattctcggtatcattaaaagctgaatatcatggcaaagaaaacaagaatcgaggacatcgacagcgaagccgtaatcaactcgttccggctggatgatacaagcattccaccggaagcgagaagtgcgggtggaaacgcaccttctccacctccgaaagaagcgacacaagaagcagccgtttccttgcctgtcccgcactacaaagaggaaccggaacgcaggcgcaggaacggcaagctggaaaaaccggattatgatacggtattcatgtgcgggtccaatgtaacggcaaggctcggcaagcaagtatatatccgcaaggaataccacgaccgcatacagaaaatgcttcatgtaattggaggcaacgaggtgactatcgcggcttttcttgacaacgtgctgacacaccatttcacgctgttccaagacgagataaccgaatcgttcaaacggcatatggaatcctataacctataaacacccaataaacaacaaaaaaagtatgaaaagaacaaagaagaaccgtcaggcagactgcctgcaaacagaaaagagagagagaaccgctgcccgttcagcaaagtgtacaaccgactacaatcaggaaaataccggcggtgacttccgcaaggataaaagcagagacaaaccgctctcgactttcctgcaagcatcggaaatcaaaacgcggcaatgtatatacatcagccgcgagatccatgagaaagtcgccatcgttgccagtcggatgggaaacggcttaagcatcggcaagttcgtggacaacatcctccgagaccatttccgacaatacgggacacagtacacggagcagattgaaaacgccaaaaaagtgaaactatgacaaaggtgtttttaatcgtatcggttgcctgcaacgtgtggtttctgtccctgttgctctacgaccgcatcatggaaacgaaacttatccgtttcttcagacacattgccggtctgtggcggtcattggacagtacggtggcagagctgggaaaggataaggaaacgcctcccacagatacctcggacatcatcggcaagagccgtttcaagatggctccaacccggacaaagactgccataccgacgcaggaagctgccacttcagaaaaaggcattgagctgtcggaggaagaggctacttttgacgacggaaacacggaaaccgcttcccgtccgcgacaaatacccgaagacaagctcgatgagaccttcatgagcatttcaccttcggaactggagtacggagaggatgatccggaggacgaagaaccggacaaaaagcaggcttcgggaagcagtttcgaggatattgacatagcagtacgcgccatacggaaagattcaccatccgatgaggaaatgcgacacgccgggaaggtcatgacggaactggacggaacagagcttttcacaaggataacggaacgcctgaccgatgaagcgatgagcgagaggcttgcaaaggcgatgtctgttttcgtggacacggtgaacatgacagtgacacgccaaaaggaaaaggtgttcgtgattcccgacaatatcgaggagttcgatttccgaaactatgtataacgactaaaaagaatggaaatgaaaatgtaagacggtatcacaccatgcgcacggcagtacaaggtacagccaatccgcaacggacacacccaagtccgtagaaacaaacgggctaccactaaaccaaagtaaagtaatcaagtatcaaccgcccgaaaaaggaccatccaccctttcgacggcacaaaacaagaacagtttatgaacaagaacatcaagaacgctttgacaagcaagaaatcaatcctctctgcggcactcctcatcgctgcaaccgccaccgcttccgctcagggaaacggtcttgcaggcatcacggaagccacctcgatggtgagttcgtattttgaacccgccacgaaactcatctacgccatcggcgcggtgatcggtcttatcgggggcgtgaaagtctattcaaaattctcgtcaggagaccccgacacctccaagaccgccgcaagctggttcggtgcgtgtatcttccttatcgtagccgccaccatcctgcgctcattcttcctttaatatgataatgtatggctgaatacccgataaacaagggtatcggccgtccggtcgagttcaagggactgaaagcccagtacctcttcatcttctgcggaggactgctggctctcttcgtcctgttcgtcatcctctacatggtcggcatcggccagtggatatgtatcggcttcggtgcggtatcgtcctccatcctcgtatggcagaccttcgcactgaatgcccgttacggcgaacacgggctgatgaagttgggagcggcacggagccatccccgataccttatcaaccggcggcggatcacccgattattcacacggaaacgaaaggaagaaactgcatgagaaatacatcgaaaataacgacactggaaaacaagttcccgctgctggcggtagaacacggctgcatcatctccaaggacgccgacatcacggtggctttcgaggtggaactgctggagctttataccgtgacaagtgcggagtacgaggcgatacacggctgctggtgcaaggcgatcaaggtcttgccggatttctccgtcgtccacaagcaggactggttcatcaaagaacggtataagccggaactggagaaggacgacatgagcttcctctcgcggagcttcgagcgtcacttcaacgagcgtccgtacctgaagcacacgtgctacctctacctgaccaagacgacaagggagcgcaaccgtatgcagagcaatttcagcacactgtgccgggggcatatcatcccgaaggagctggacagggaaaccgccgcgaagtttctggaggcgacggaacagttcgagcgcatcatgaacgacagcggttttgtcaggctgcgccgcctctccaccgacgagattgtggggacggacggcaaagccgggctgctggagcggtacttctcgctcctgcccgaagataacgccacgttgcaggacatcgagctttcggcaagggagatgcgcatcggcgacaaccggctgtgcctgcacaccctttccgacgcggaagacctgcccggcacggtggcgacagacacccgttacgagcggctgtccaccgaccgctcggactgccgcctctccttcgcctcccccgtggggctgctgctgccgtgcaaccacatttacaaccagtatgtgattatcgacaacagcgaggagaacctgcagaggttcgagaagtccgcccgcaacatgcagtcgctctcccgctattcaaggagcaacagcatcaaccgcgagtggatagaccagtacctgaacgaagcccattcctacggtctgacctctgtacgggcgcacttcaacgtcatggcgtggagcgacgacgcagaggagctgaagcatatcaggaacgatgtgggaagcctgctggcaagcatggagtgcgtgccgcgccataacaccatcgactgcccgacactctactgggcggccatgcccggcaatgcggcggacttccctgcggaggagagtttccacaccttcatcgagcaggcggtgtgcctcttcacggaggaaaccaattaccgcagctcgccctcgcccttcggcatcaagatggtggacaggctcacgggaaaaccgctgcacctcgatatttccgacctgccgatgaaaaaaggcatcacgaccaacagaaacaaattcgtgttggggcccagcggaagcggcaagtccttcttcatgaaccacctcgtgaggcagtattgggagcagggcacgcacgtggtactggtggacacgggaaactcctatcagggactgtgcgagatgatacggcgcaagacgggcggcgcggacggcgtgtatttcacctacacggaggagaagcccatcagcttcaacccgttctacactgatgattatgtgttcgacgtggagaagaaggacagcatcaagacgctgctgctgacactctggaagtcggaagacgacaaggtgacgaaaacggagagcggtgagctgggcagtgcggtgaatgcctacatcgaacgtatcaaggcggacaggagcatcgtgccctcattcaacaccttctacgagtacatgcgtgacgactaccgcagggaactggcggagcgtgagataaaggtggagaaggaagacttcaacatcgacaacatgctgaccaccatgcggcagtattaccggggcggacgttatgacttcctgctcaactccacggagaacatcgacctgctgggcaagcggttcatcgtcttcgagattgacagtataaaggaaaaccgcgaactgttcccggtagttaccatcatcatcatggaggctttcatcaacaagatgcgacggctgaaaggcgtgcggaaacaactgatagtggaagaggcttggctgtgacatgtaagtcttgtatatgattgttcaactttcattccacgagttggaaatagaacgattgaacctgttgttccgtcaacagtagcctatgggaacgtgcggtattaagcaatgaacccgtgcggtaacagaaccaacaatgaagcccttccgaaaggagaagtctgaaccgtgaggggatgacaactgccgttagtatcgaacgacaggggagctaggctgaatggtatgaataacgtaatgtgaaccgttgataaacgtcgtaacttcgaatgagctgctaatgatactgggctctaacccaaaagggatgcagtcggataaccttctccatgctaaggttacacggacataacgactgccggcggatagacggattctaacccattcgtttgtcatatacaagaaacatggtaaacccgtacttctcctgttaacagcaggtaagcagaccgtaagtgaagccgaatggagtgcgggcagaggaatgcggagaaagcgaatgccgttctgtaacggaacggatagaggttgaaacatcacctcacacgaaagtgggcagacttccgcatggtggatgttttacaagaaacttatagaacttatttaaaggagaaaagcaaatgaacgagattaaaacatcgtgtgcatctactgaccggaaatggagcacttgggaaagcatagactggaacaagtgtgagatagcggttaataagctacaagcacgtattgtaaaagctcaaaaggcgggcaaacacggcaaggtgaaatccttacaatgggtgctaacgcattcgttttacgctaaagctttagccgtaaagcgtgttacatcaaacagtggcagtgacaccgcaggcgttgacaaggtgaaatggtcaactcccaatgccagattcaaggctatcggtgaactgaaaagaagaggctacaagccccagccgttaaaaagggtcaatatcaaaaagagtaatgggaaactacgtcctttaggtatcccgacgatgaaagacagggctatgcaggcattatacctgcttgcgttggaacctgtatcggaaacaactgcggacagtaattcctacggtttccgtaaagagagaagtactggagatgcaagggaacaatgtttttgtgtccttgcaaagaaaacttctcccgaatggattatggagggtgacatcaaaggttgtttcgaccacatcagccacgaatggctgctgaacaatatccctatggataaagtgatgctgcggaaatggctcaaatgcggttttgtcttcaacaaggagctattccccacggaagagggtaccccacagggcggtatcatttcaccaactcttgcgaatatgacactggacgggctgcaaactatgcttgcagagaagtatcacaagaaatttgtaaacaggaaaacgacctactatcccaaagtacatcttgtacgctatgcggatgattttatcatcacgggtagaagcaaggaagctttggaagaaatcaaaccgttagtagtagactttctcaaggaaaggggattaaccctgtcggaagagaaaacaaagattacacacattgatgacggatttgattttcttgggtacaatatccgaaaatacaaaggagtgcttctaatcaaaccgtccaaaaagagcctgaagaaattcatgcagaaaatccggggaatcattgattccaataaaggaagcaaacaggaatcacttataaggctcttgaatcctgtgataacaggctgggtaaactactataagaattgtgtggcttctgacacattcagaaaagctgactacctgatatttgaaaagttgtggcaatgggctaagagacgacaccccaagaaaggcaaatactggattgccgaccgatactttacacgggtaaaaaaccgcaactggtgcttcgtggcaaacttcaagaaaggcaagactgatgacaggattgcactgaaaaggctgtatgacacaaagattacccgatatgtcaagataaaaggtgaagcaaatccctttgaccccgaatggacagagtattttgaaaagcgtaagacttacaagatgctacagtcgctcaacggtagaaaatcattgctgtacatgtgggaaagacagaaccatttatgtcccgtatgtggtaaacccatagacaaggaacatccttggggaacttcccaacaaatagtcaatggcaagaaagtaaatttcctgctgcatgacagctgtagaagaaaagtcattcaaactaataagatgtaactatgagctggtttctattaaatagaaatttaacactgcttgagccgtatgattggaaactttcatgtacggttctgaggggggaaaggggcagtaatgcccctgacctacccggcaaggctctttcttcggcgaacatggctgaatatctgcgctatatgtacaagacggtcagaaagtattacggtgaggcaatcgtggtgacgcaggaggtggacgacatcatttcctcccccgttgtcaaagagagcatcatcaacaactcggactgcaagatacttctcgaccaaagaaagtacatgaacaagttcgaccagattcaggcgttgctcggactgacggagaaggagaagtcgcagatactctccatcaacatggcgaacaacccttcaaggttctacaaggaggtgtggataggcttgggcggcacgcagtcggcggtctatgccaccgaggtgagcgcggaagagtatctggcgtacaccaccgaggaaacggagaaggtggaggtttaccgtctggcagagctgctgggcggcgacatcgaagccgccatccggcagcttgccaaaaggcggagaaacagacaataagcaatcaataaaacagatttatcaacgaaaaaagaaaagcgtatgagtatttcaagaatgaagatgctgaaaatcagcgagtgtttaataggattggcagtcgtgatgctgcaatcctgcgacatggcggataaccgccgcgaccaactgtgcggaaactggacaagcatggagggaaagcccgacgtgctcatctacaaggagggcgaagcctacaaggtgacggtgttcaaacggagcggcatccgccgcaggctgaaaccggaaacctacctcctgcaggaggagaacggcaatctgttcatgaacacgggattccgcatcgacgtgtcctataacgaggctaccgacgtgctgaccttctctccgaacggggactatgtgcgtgcaagccacgaaccggagaacccggcagaagaataagaatgtacaaccgctaaattcaaagaatatgagtatgaaaacaagaatggcaatcgccgtatgcctgtgcctgcttttcgcaggcagtgcttccgcccaatgggtggtgagcgaccccggcaatctggcgcagggcatcatcaacgcctcgaagaacatcgtccacacctcgaagaccgccaccaacatggtgaacaactttcaggaaacggtgaaaatctaccagcagggcaagaaatattacgatgcgctcaaatcggtgaacaacctagtcaaggatgcccgcaaggtacagcagaccatcctgatggtgggcgacatcacggacatctacgtgaacaacttccagaagatgctccatgacgggaactttacccccgaagagctgtcggcaatcgccttcggctacacgaagctgctggaagagagcaacgacgtgctgacagatttgaagaacgtggtgaacatcaccacgctctccatgaccgacaaggaccgcatggacgtggtggagcagtgctactccaagatgaagcgttaccgtaaccttgtgggttactataccaacaagaacatcagcgtgagttacctgcgtgcgaagaagaagaatgacctcgaccgcatcatgggactgtacgggaacatggacgaaagatactggtagcctatggaatttgacaaccttcatcagattttgcgctcgctttatgacgggatgatgccgctgtgcggtgacatggcggacgtggcgagaggcatcgccggactgggcgcattgttctacgttgccagccgggtatggcagtcgctggcgagagccgaagcgatagacgtgttccccatgctccgcccgttcgccgtcggtctgtgcatcatgttctttccgacagtggtgctcggtacggtgaacagcattctgtcacccgtcgtgcagggcacggcgaaactgcttgaaacacagacgctggacatgaacgaataccgcaggcagaaagacaagctggaatacgaggcaaaagtgcgcaacccggaaaccgcctaccttgtgtccaacgaggagtttgacaagcagctggaggaactgggctggtctccctccgacatggtgacgatggcgggaatgtatatagaccgggggatgtacaacatgaagaagaacatccgtgatttcttccgcgaggtactggaactgatgttccaagccgccgccctcgtgatagacaccatccgcacgttcttcctcgtggtgctggcgatactcggcccgatagtcttcgccatttccgtgtgggacggcttccagagtacgctcacgcaatggttctgccgctatatacaggtttatctgtggcttccggtgtcggacatattcagcaccatactggcgaagatacaggtgctgatgctgcaaagcgacatcgagcgtatgcaggctgacccgaatttctcgctggattcgagcgacggggtgtatatcgtgttcatgattatcggcatcatcggctactttacgatacccactgttgcgggctggatcatccaagccggtggcatgggcagttacgggcgcggtgtgacgcagcttgccggacgcggagcggcccttgcagggggtgtcgcaggtgctgcggcaggaaacgcagccgggcgtgtcggacgtgccgggataaatatgggcaaggcggcatggaaccataccgccggacgccttctcaaacggaaataacctataaaatcagacagaaatggaattcaagtcactcaagaacatcgaatcatcgttcaggcagatacgcctgttcggtatcgtcttcctcgccctttgtaccgtgataacggtctggagcgtgtggagttcctaccgctttgcggagcggcagagggaaaaaatctatgtgctggacaacggcaagtcgctgatgctggcactctcgcaggacctttcgcagaaccgtccggcagaggcacgggaacacgtgcgccgcttccacgagcttttcttcacgctctcgcctgaaaagagcgcaattgaacacaacgtgaaacgtgccctgctgctggcggacaagagcgtgtaccactactattcggactttgcagagaaggggtactacaaccgcatcatcgccgggaacatcaaccaggtgctgaaggtggacagcgtggtgtgcgacttcgacagctatccctaccgtgccgtgacctatgccacacagaagattatccggcagagcaacgtcaccgagcgcagcctcgtgaccacgtgccggctgctcaactcgtcccgttcggacgacaatccgaacgggttcaccatcgaggggttcaccattatcgaaaacaaggatttacaaaccatcaaacggtaatagggcatgaaaagaaaaagtatcagaaaatcagcgtggggcgcataccggaaactccacgacaagaagaaaatgtgggtggcaaggctcaaaggctatctggacggcttgccgccgaagacacgcaggcgcatcgtgctggtcatgtttgccattttcgccacgcttgccctccacaccttcggcaaagccgtccatgacatcggcaggaatgacggcagacggatgaggatagaccacgccgggcaggtggagctgtccgtgaagtctgacaagaacaatagttttacaccttattataatatgtatggaacagacaaagaacgaaacaaagattaagggcaataccggaaacacggctgcgcccgacaacagggaaaaacagaaaaaggagcgtaaaccgctgaccgaagcacagaggctgcaacgtcagaaaatgatcgtgctgcccgttatggtgctggtgttcatcggggcgatgtggctgatattcgccccgtcctccgaaacggagcagaaaccgggaacgggaggttacaacaccgagatgccggatgcggacaaggcagaccgccagataatcggcgacaaactgaaagcctacgagcaggcggcgatggaggaacagctggaagaacgggaccatgccgtgcggcagctgggcgacatgttcgaccatgaaacgggagatacggcggatggaggtggcttcgacctctccactcccgaaggaaaggaagacgggtctgccacacagaccatccggtcttccgcagccgcctaccgcgacctgaacgccacgctcggaaacttctatgaagaacccgcacggaacgatgcggagatggaggaactgatggagcgtatatccctgctggagtcggaactggaaagtgaaaaggaaaaaggttccacgatggacgagcagatggcactgatggagaagtcctacgaactggcagcgaaatacatgggcggacagaacggcacacagacggcaaagccctcttccgttcagaaagcagggaaggacaaggcggaacccgtcgggcaggtggaacgtcaggtggtgtcctcgctcgcacagcctgcgggtaatgcggaggttgccgccacctgtccgcaggagcgtaatcggggctttaatacagcggtaggcggaacagccatatcggacaagaacaccttgtcggcttgcgtctatggggcgcagagcgtgacggacgggcaggcggtcaggttgcggctgctggagccgatggcgatagcggataaaatcattccccgtaatgcggtggtggtcggcaccgccaagatacagggggaacggctcgaaatcggaatcagttcgctggaacatgacggtaccatcatcccgatagagctggcagtctatgacacggacggacagcccggcatcttcatcccgaactcgctggaactgaacgctgtcaaagaggtcgccgccaatatgggaagctcactcggcagcagcatcaacatctccaccaatgccggggcgcagcttgcctctgatttgggcaaggggctgatacagggcacaagccaatacatatccaagaagatgcgtaccgtgaaagtacatctgaaatcggggtacagggtcatgctctatcaggaagaaaattaagaaaacaaccaatcaaaaattttatttaccactaaatccaaagtaatatgagaaaagtaatcatgatgtttgcccttgctatgggcatcgtaactgtccatgcacaggaaaatgtgaccgttgctgaagagaacaacggaagtgagcaacagacggacgcacagccggtattgaccaaggaggtctatccgcagaaggaggcggacggcgacctgtatcacggtctgacgaagaaactgacttttgaccgcatgataccccctcacggtctggaagtgacctacgacaagaccgtgcatatcatctttccggcagaagtgcgctatgtggatttgggttcgcccgacctgatagccggaaaagcggacggggcggagaacgtgatccgtgtgaaggctaccgtgagaaactttccgaacgagaccaacatgtcagtaatcacggaggacggaagtttctacacgttcaacgtgaagtacgccgccgaaccgctgctgctcaacgtggagatgtgcgacttcatccacgacggggaatcggtgaaccgtccgaataatgcgcaggaaatctacctgaaggagctgggcagcgagagtccgatgctggtgcgccttatcatgaagtccatacacaagcagaacaagcgtgaggtgaagcatatcggcagcaagcgtttcggcatccagtacctgctgaaaggcatctacacgcacaacggtcttctctatttccacacggaaatcaagaaccaaagcaacgtgcctttcgatgtggactacatcacgtggaaaatcgtggacaagaaggtggcgaagcgtaccgccgtgcaggagcagataatcctgccgctccgtgcgcagaactacgccacctgcgtgccgggcaaaaaaaacgagcgtacggtcttcacgatggcgaagttcaccattcccgatgacaagtgcctcgtggtggaactgaacgagaagaacggcggtcgccaccagtccttcgtgattgagaacgaggatctggtgcgtgccaacacgattgacgaacttcaagtgcgctgaccatgagaaagtacatcgcaatcatcatcgcgtcgcttgcccttttcacggggcaggcgcacgcccaacgctgcctgccgaaaatgcagggtatcgaagtaagggcgaacatgacggacggtttcaagcccggcggcaatgacggagggtacagtttcggagcggctttatccacctatacgaaaagaggaaacaagtgggtattcggcggcgaatacctcttgaagaacaccccgtacaaggacaccgccatacctgtggcgcagttcacggcagagggcggctacttcttcaagctgctgaccgatgcccggaaaatcgtcttcgtctatgggggcgtttcggctctcgccggatatgagtcagtgaattgggggaagaaggtgctctttgacggagccacactgcacgagcgggacgctttcatctacgggagtgcgctgacgcttgatgtggagttttatgtggcagaccgtatcgccctgctcgccaatctcagggaacgcctgctgtggggtggcgacacgaagaagctgcactgccaatggggtgtgggcataaagttcatcatcaactgaaaggcgtgtatggaacggacggacattgaaaacatgaagcggataccccttgcggacttcctcgcacggttggggcatgagcctgtccgaagaagcggaaacgagctgtggtatcgtgcgccgtaccgcaacgagcgcacaccctcgttccgtgtgaacgtggcgaaacagctctggtacgacttcggtttgggcaagggcggcgacatattcacgcttgccggggagtttgttcgaagcggtgatttcatggtgcaggcgaggttcatatcggaagccgcccatataccgctaacggcattgccggcttttgagccgaagcccccggaaccggtctttgaggaagtggaagccgcccggcttctcctctctccgctgacggaatatctgaaagagaggggtatcccttacgctgtcgcatcgcgtcactgctgccgcctgaactacggtgtgcacgggaaaaggtattttgcagtcggtttccccaatgtggcgggcggttatgaaatccgcagccgccatttcaagggttgcgtgccgccgaaggatgtgtcgctgataaggacggaagccgccggcactgatgcctgctgcgtgtacgagggatttatggacttcctttccgctgtcacgctcggcataggcgaaaggtgcgaccaccttgtactgaactcggtcgccaacgtgaaaaaggcgctgaggtatctggacggttacgggcgcatcggctgtttccttgaccgtgacgatgcgggacgaaggacgcttgaagccctgaaagaacggtatggcgggcgtgtcgcagaccgctccgccctctatgacggttgcaaggacttgaacgagcacctgcaacggacaacgaaaaaacagaatatcaaccatctaaaaatcaaatgacaatgaatataccgaacaacaagaacaagagaacatcatttttcaaggcgttggcactttgcctgttcgctgccatatcattcacattcgtatcgtgcgacgatgacatggacatccagcaatcctatcccttcacggtggaaacgatgccggtgcccaacaaggttacgaagggtcagacggtggaaatccgctgtgagctgaaaaagacgggcgattttgcgaacacgctctataccatccgctatttccagttcgagggggaaggctccctgaaaatggataacggcatcacgttccttcccaacgaccgttacctgctcgaaaacgaaaagttccgcctgtattacacggcagcgggcgatgaagcgcataatttcatcgtggtggtggaagataatttcggaaactcctttgagttggaatttgagcttaacaaccggaatgcggaaggggaaagccagaccgtcatgtatgccgccaacttcaaacctatgccaagatgatgcgtgtgttcatggctatcctctgttcgctttgggcggtttgctccgtgtctgcacagagcaaccgccaagagggaacggacaggcaggcggctatctaccgtctgccgcttatggaacgggcgtttctgtgtacccgccactttgaaggctggcatgaccaaagctgctatccctatgtgggttgggggcaccgtttacaaaaaggtgaaagctattcggcacgcacgatgacgaaacggcaggcggacgcactgttaaggaaagacttgcggaagttcatcggcatattccgtaattttggacgtgacagcgtgctgcttggcacgctggctttcaatgtcggtccggcgaagctcttggggaacgggcgataccccaaaagcaggctgataaaaaagctggaggctggcgacagggacatttaccatgagtatgtcgctttctgccattataaaggtaaacggcacgccatgctgctcaaacggaggaaggcggaatttgcgttgctgtatgtaccataacacatctgtatatgtctgaccaaagaaaaatccgatgaagttgatggcttcatcggatttttctttggtttcatggcttcgggatttttcccttgccggaaactttacactttatcattcttgaaaattttcacccataaggctgttgaaaattatctttttgcttatgcctccgttgcttttcaagatgatttttcagttctgcctgattgcttccgtaaaacttgtttttgtgactgacatcgtagattgggacaaaggtttctttgcctactttctttgtccgccatcctgctcactgaaagaaagtaggcggctttgccgcccaccgtttaaaaatgtgtgcaaagtcccgttaccatagtgaataactcttcgagcatatcacaatatacgccttcgtgcgtggctatgtccgttgtcctgcactcaaaggtctttttgctgaaggtcttgcggtagaaacgcatattatataaatctgctcctgcatcgtagataatgtcaaggcggtttgcgctcgtcttgttccgtgcaaggctcatacggagtccgtttcccatatctatgaagtctttgcttcctgtcatggcggcaaagcgtctgccgcctatctgttcaaaaatggtctttgctatcatatctgttttttagttttatggttggcggtgttctcaccgccaacttgttcaatattcggttatttcggcaatgggtgtatggcgtttcagccatttcaacagacactccatattgtactcgctcgttatgactgccgtatgggtgtcaatggcggtaaacctgcttccctcatagtcatctatccactctttgagggttgccactccccaaaactgcgtatctctgaaaatgccgtccaactccgtaatcgcttctctgaacttgacgattattgtctgataggcgggtgtattcataatttatcctcctttccttgtttcttgttcaaccacttgtccctctctgctcgacattcgcccaatgtgggtttcacacaagagaaaagttccatatccgtgtggcggtagtcatactgcacaagggttcttctgcgtctgcctgttcctaattggaaacgctcgtacttttccgtacctgccgtttggcaggtactcactccattgatggtcattcgtgtactcatatcatttgcttttgaatgaatttttctaaatacttctcttgtatgccgagtgcttcggcatagatacttaattgggctgcataacgggtattgtaataactcctttccatttcgtttgtggataatccgatatgttcccttatatcgttcaaatgtcttttgacgatatacttgtagtagcggtttcttttttctctttcgttggtcataattccattctgtttgtaggttaaaaatgtactgacagcactctgttctgcattaccatttcggggtcgctcgtgtagcgttggtgcagataaaaatggtgtgagccgaagccgtaacagaagaacttgtcaagttcgtgcttttcggcaaagtcctttacactccatcttaactgctcctcacccgttgcaagagtgaggaggtttacaaactcaaggaacatctttggaattgcgtcatcccaaagacaaaccatgctttcaaatcttacttccatattgttcaatattataggtttatattatgctgctttcatccgttcacggataaggttggcgttcttgttcacaaggtctatgatacgctcgtgatattcggtgtcttggttgtacttgccgtgacactgcacaactttgaaggtgcgcaagtccacctcaacggtttcaattatctcaccgccaatccttgccgagagtatgagggtgtcggctttcttatagtattcactgccgaacacgcagatgttctgcgtcttgccctcgttgtaatactcgtctatgctttcaagcaccttgacgattatttcctcgtcagtgattaccaatccgaagaatttggatttattggcgatgaaatcctccgcatctttcttttgttggagttgtcgctgctgctcacgctcacgcttttcaatctcccacctgcgctgtcgctcaatccgttccttctcatgtatggcttcaatctttcgggttgccttgtcgtgtgccaccatgaaatcttcgggacaaatgttcttcgggttgcggaggtcttgaccgagttttttgagcatacgtagatagtcgcaccacatggagaggttgcctatctgatatttatgacgtttggcaatcagatatgacgcccaacattcatcggctatcattggattgaaaagaaagtatttcatatcctcaatctcaccgcctttcataagggtttcaattcttgggtctgaaagcaaagccttgaaaagacgcacgggggtgatgccgtgaaaatcgcccttgaaaccgttgcgcctgagttggggcaatatcttcatattggggtacacattcccccacgccacaacatcatcataaaggctgttgtgtggtctgacctccatatcgctatccaaagcccacacatcgcaatagcagaaagagaagccacggagcagagccatgtcggtaatgatgcctttgggtgaaatccaacgctgcacaacctcgtggcagtagaatttcatcggctcgcctttcctgctctcgcatctgacctgcgccacacggattaactgataccctttgcaggtggttatcacgctgaaataccgcgtttccttgtgggtgcgctttcgggtgtcccatactttgagttcagcacggcattgggggcaggtacaaccatcaaggctgtcgcataatccgttgttgctgtgccactcgtgaccgcagtcggaacaagtgatgtttcctttcttggtgcggtagccgatatgttcaacacaatggcggtatgcccaatcaatttgtgttgcggatatggggtgaaggttggcggaaagtcttgccacctctttttgtatgcgtgtcttgggtttcataatcaaaagtcaaatagggagggttgtacaatagtttcttttttcgctgtcggtctgttgcggttttgcaacttgcggacttcctcttcttgatatttttggatagccttctgccgtgcttccgccttttcctctgccgtgagttccacaatatggttcaccgccacttggcagttcatcggtttgcccacctctatctcgttttcttcatagtagtggatggcttgcccgaatatctctccgtccgtgaagccgttgcaaccgctgttcttcacatagttcagaatgtaggtcacgcagtcgtctatgttcttggctgggttgctgaaacttttggcaaagagttggtcttcctctgcacgttgctccaagtacatcagtatcgttttcttaaaatggtcagttcctttcatatcgctgtcgttttagattgtttctttcagtatctctctccaataggtcggctccacttcgctcaataggaagtcggtaaaatcctttcgggtgtccttgttcagttcgtggtagagttcacggaacacggatatattgccgttgatgtatgtttccaccatatactcgaagatgttgtccacctcatagtatctgcactgctgtgctgctgtcttgctgtttctctttgccatatcggtaagtattaaagggtgaataaccaaaggataagaccgaagaaggcaatggtgtaataagcaaattttaaatcgacaattttcggaaaagtaaaatcgacacaaataagtcgagacaaaatgttaataatatcaattaaatactatagccaaaccctatttaaaggggattatccttattctttatcattgtcaaagatggattttctatttcccattctgtagctttgtccagagagtttaatgacttcacaatgatacaaaagccgatcaagtatagcagaggcaagcacttcatcatccagagtttttgcccattcagtcggagccttgtttgttgtgattatcaaggacgctttctcatggagagtgttgattaggttaaagaaacccgctgcatcttcttttttcacagggaacagcattatatcatcaatggcgacgaggtcagctttcaacaaacggttgtaggcagtcatggcagatggcatcagtgttttcattttaatggtgtttataacatcttccatcgtaaccatgtatgccttgtaaccttgcgataccgcttcatagacaagtcctgccgcaataaatgttttcccggtaccggatggtcccatgagtatcagattgtaattctgttcaagccatccgagatgccttaattcacgcagtcttggtgcggttatgccttgtgagtaattatggtcgaaaaggtctaggtcgtgtcttgacggcagagaagctgcttttagtcgccgttgtaagtctttgctatccctttccagaacttctctagcaagcaaatcatgtaaaaattcaacataggtcttgctctgttcccgtgcaatatgggcttcggattccaataacctcggaagggcatacaagcgtaaacgcgagcataaatttttaatctgttcgttcattatcatataaaaaaggtattgaatgttgatatgtctgttttatcgggcaccatggaagaggtatcggaggatgggaccggctctgtttctacaggaacttccacaagggcctctcctttgtggactctgatactttcggctactttcatcaggctacatccattaaagaccttcacttccaaacatcttgtaaaggcttctatcaacgtgggttctgtatagaagggatatcggagaagtataaactgcaggttgtctctatagttacgattcttatgaatgcgtagttcagataaataggtatcaatgaccgtatccccgggaagtcttttacggacagtagcctcgtaatcatccaaggcagcttcacggtctcgccgatgtgaggtattacttattaactgtcctttatctttgcagattttgtgtgctgctatatttttccctgtttcaaggctgtaaatatacagcatctcttccttttcttccagatatacctgtgttcggtgaccttggtaggtacctgtaggaacactgtaatagttccccttgtaggtaatcacgttatccttcctgacatgatggggtaaaagctttggggaagggattgtcggaattccccgataaggcatgagatggggtcttcccatctcgaactccactgatgggatacgacgtatgccatgatgctccataccgttagcagtacgttgcaaccatgcttgaacctcctcgttgagttgctctatggaggtaaattcacgtccccggagaaaattgtactttacgtacttcactacgttctctatctttcctttgctttcgggatctgatttacggcagaacaccggctcgaacccatgttcacgaaccaaggctcgaaagccgtgggtaagtatcaggtctcctaggttctccttgacaagaaaaaccttgtcctggtcataaactattttccgaggtactcccgagaaatattcaaaggcaagttcgtgggcataaactgcaagatcggtagtaaacggggtacggctgaaataaataaatttataacggctacggctaagactcattgcaaaaaaatatactttcaagggtatgccttgcgaagtcttcatccagcgttctccaaaatcgcattgggcatattgaccataaggtgtttccggttgcttctcataaggacggtaactcttttccaattctttgggcagattatgattcagacgtactcggttgacaaagttggataccgttttagctgtgacatggggaaggtctgtaaaatgttcccgtaaacggtcatggagttgcggagatgacaaaaatggccatttgcgtaactctccgataacataagcttcataatcatcaagtttatggctgtatcggcgctcgtaactttgactctgcttaaactcttcttctgtcatagacagatacttggacaccgtttgacggtgaagacctaatgatatgcctatttgactcttgtttaggccatttgaaaataattctttaactttgtaccacattagatacttctgtaatttggaagtctcactcatagcattgtgattagttgttgacaactctaatttacaatgctattttcttttattctattgtcgattttacttttccgatttttgacgatacaaaattaccgattacaaatggtggaaaggatagccacgattatacctattgccactcggaacaatccgtttacaatctctgaaatgatgcccaagaggatgccgaacatcccaaaggcggtgcgcacgattaaaccgcatactgcaagtcctatgttctgcgccacttgtctgaaatttgccgttgctgtcatatatacgttgtttttgattttttttgtttttaatgcggattcaagagctgagggagttgagtttcaagctatcttatctgcctctcgtttatccgacattttttttaatgcgtctttctgtcgcatcggtcgttttcgtttcgggtgctcaaaaaggtagggattaggggatgcaaggtttttcggaaaaatactacccgcagggctggagatttttccagaaaacaggaggctcgaccttgcatttccgtcaaatcccggaattacctttgcgcccagaacgaaaatgactgactgatgcggctactgaaaggcgtaaaaatggaggtaaacggaagtagaggcagattcgagagaaaacttcagagagaaatccacaaaaagaagaaaagacaaagagaaaggaaatactgccggaagcgtgaaaccgggcaaaccatatgcaaggaagtatggtttatccgtctggccaaacccgtttggtcgggcaaataaaccattcttcccggtttgcctgctgtgggtgacggcttgtcccatttatgggcgggcggtcacatgcagctttccgctaccggctcaaaaaaacagcaaaagaaaaaaatctcagaaaatccgtaaaagcacctttgcggcataagccctaaagaaatgggccttgcttcatcagtctaaacttgttgtttaggcatgaggcaaagcccttttcttcgcttatgcggatagtcgggacatggttgtcaaaacttgttttggcgatggtgtgccgacgaaataaaatcgcttttacggaaaagccaaattagggtgaaaaaagtagggagattctgtcgtaatctcccgttttatttgtacttttgtacttgaagagttctttgaaggttacgcaacgcgcagaagtatatttaaggagataactctcttattcgtaacctattaccataacgagcgaacaatctatgctcattttcaatatcttagacctttttcataacttcgctccacaaaaataatataaatcaagggtaattgagtgcatttttatatttttgtatcattaaaaaccagactaaattataaatcaaatacgatatgcaaccattaacagcaatttcgcctattgacggaagatatagagacaaagtggagaacttagctaattatttctctgagagtgctttaattcgctaccgtgtaacggtggaagtggaatatttcattgctttatgcgaaattcctctgcctcagctcaccaagtttaaccatgatttatttgagcaattacgtgaaatctatcgcaattttacaaccgaggacgcacaaaaaatcaaagatatcgagaaagtaacaaaccacgatgttaaggcggttgaatattttatcaaagaaaaattcgacgaattaaatcttcatgaatataaagaatttatccatttcggtctgacttcacaggatattaacaacactgcagttccttgttcattccgtgacgcggtacacgatgtatactatccggttgtagatgaactgatcgctaaattggaagaattagcagaagagtggaaaaatgtagccatgttggcaaaaacacacggccaaccagcatcacccacccgtttgggaaaagaaatcaaggtattcacctatcgtttaacccgtcagttagaactattgaaaaaagtgcctatctccggaaaattcggaggagctaccggtaacttcaatgctcaccatgttgcatacccagaaatagactgggctgaattcggtcacaaattcatgacagaaaaattaaaattggaacgtgaaacatatactacacagatttccaactatgacaatttcgctgccctatttgacaatctgcgccgtgtaaacaacattctgattgaccttgaccgtgatttctggacttatatctcaatgacctatttcaaacagaaaatcaaagcaggagaagtgggatcatcagcaatgccacacaaggtaaatccaattgactttgagaactctgaaggaaacttaggtattgccaatgcagtatttgagcatttaagcaacaaactacctatttcccgtttacagcgcgacttgacagattcaacagtattgcgtaacatcggagtgcctcttgcacatacgattattgcaatgaaatcaaccttaaaaggattgaataaacttatcatcaaccaagatgctatcgataaggacttagagaaaaactgggctgtcgtagctgaagcaattcaaacgatattacgtagagaaggatatcctaatccatacgaagccctgaaagccttaacacgtacaaataacaaaatcactcaagaatccattgctgaattcattgacaccttggaaattgctgataatttaaaaactaaattaaaacaaattactccgtctaattacacgggtatttaatacaaatcagagagttggcaaaccattcctatgcgtttgtccaactcttttcttttgattattgatacatcacttatgcacgatctcatctctattcttaaaagatttattccgccttacaagatacgggtaattaaaagtattatttacaacttcttgcatgccatattcggcagtttgtccattgccatgctgatacctattttaggtattatattcagcagccagcaggaagtgacagaaaaaattccatttcaacttgatacagcaaccatcaaacatctttttaattactacgtcactcaaataaaaatagaatacggtccttctgctactctcatcttgattggtagctttgcagtattggcaacagccttgaaaacgggatttgcctatctgggagcttatgagttaatctatatccgcaatggagttgtcagagacatccgccgtaaaatatatttaaaaatactctctttacctctgcccttcttttcagaggaacgcaaaggagatattatagcaagaatgacaggagacgtacaagaagtggaggcctcagtcatgagttctcttgatatgttcttccagagtcctatcctgattattgtctatctcgccatgatgctcataatgagttggcaattaacactatttgtattcatcttactccctatcatgggtacacttatcgggcgtgttggaaaaaacctaaaacgtcactcctgggaaggtcagaccaaaatgggcgaaattctggcattaatggaagaaacactgtccggtctgcgtattatcaaagccttcaatgcagaaaagaaaatggatacccgtttttcagaagaaaacgaagaatatcgccaaatccaaaaccgtctgatgcgtcgccgttcattggcacatcctatgagtgaatttctaggcacaattgttattgttatcatcttatggtttggcggttctctagttttaggccaaaatgcttccctaactccggaagtattcatctcatacattgcacttttctattgtatcatcaatcctgccaaaaaccttacaaacgcctattatagcatacaaaaaggtatggcagccatggatcgcattgacgtcattctgaatgcagaatcatccatacaagaacccgttcacccccaaaaactgacacaattcaataatcaaatagagtataaagatgttgaattctcatacaatgaaagcaaaaaagtactgaaacgcatcaatctcacaattcccaaaggtaaaaccattgcgctagtcggtcaatcaggatccggtaaaagtacatttgtagacttacttccccgtttctacgatgttcaaaaaggacaaatcaccattgacggtattgacatccgcgaactttctttcttcaatctaagagaattcatgggaaatgtaaaccaagatcctatcctattcaacgatactatctataataacatagcatttggtgttgagtctgccactcctgaagatgttgaaaatgctgcccgaatcgccaatgcccatgaattcatcatgcaaacagaaaaaggttaccagactactattggagaccgaggaggcaaactaagtggcggacaacgtcaacgcttaagtattgcacgtgcagtattaaaaaatcctcctatcatgattcttgatgaagcgacctctgcccttgacacagaatcagaaaaactagtacaggaagctttggacaacctgatgaaaaacagaacatccattgtgatagcccaccgactttctaccatcaagaatgccgatttaatctgtgtattccacgaaggagagattgtagaacgcggcacacatgaagaactgttggcacaaaaaggtatttataccaaactttatagtatgcagaatttctaatagacatgattgaagataagcttttaggtaaaagggttgactatcccaaaacatattgcccggaaatactagtggcagtaccacgtacccttaatcgtgaaatatatggaatccatcaggcaaatactctattttgcgggtatgactgctggcatgcctacgaagccagttttattctaaacaatggaatgcctgttgccggaatgctgaagatcgtatatccttcaaccagcaattatatcgtagaaagtaaatcgctgaaactatatctcggttcatacaacatgacccctttaggagaaacccgacaagaaggcattgaccgatttacccgtcagattacagaagatctctgccgagcactctccacacaggttaaagtatgctttttcagtaaagaaccaacagaaactcttccttttgattttaaaaactattcaatattggaagagcaaatcgcaccacaggatattcaattttccatttatcaggaacatccggcctatttgctggaaaatactaacacacaaggtggagagctacagatagcaagtcatctgctgaaaagcaactgtaaaatcaccaaccagccggactggggaagtatttacatacgtataaaaggcaagacactacctgacacaaaatccattttaaaatatattgtttcactacgcaacgaaaatcattttcatgaagaaatatgtgaaatgacttacaaacggctacatgatttctttcaaccggaaattctcatggtaacatgtctatatacacgacgtggaggtattgacatttgtcctgcccgagccaatgctccagaatatctaccaatctttctacctcaagtggaacaactgacacaacgaccattaagaaactaaaaaagaggctttcgcctctttttttaattcaacatcttttcgtacgttccatccttcaaagcctccagcccctttttcaatgcatcattctcctcattcatgatttgatacatctcattcatattccataaatcgcgggcaatcaaagcttttatctgcaatttcatagaaggcaataccggtatcagcaacttttcgtccttcttaactccggctttttcacctgccttaacaataccgtcaatcatagcatctgtcactacaaaatccttattgaatttttcaaaagtaggatatttggcttccagcgatgttctatttacatctatgtagttagccaaccaatcgccaaatacattcttagcaattaaacgattaaaatacaaataattgacattggtatccatcgggacaaacaaatcaggaatgataccgccaccgccatataccgtcctgtttttcaccttcgttgaatatttcaggctatcgttcaccacaatactgtctgcacttaataactctccgctcatataacgtttaaaaatctctgcctgatattcctcttcaccttcattatatggtttctgaatacagcgtccggaaggagtataataatgtgcagttgtcaaacgtatcattgaaccatctgtcagcggatattgtctttgtaccagtcctttaccaaaagagcggcgtccgacaatcaaaccacggtcccaatcctgaattgcaccggaaacaatttcacttgcagaagcagaatttccgtcaatcaatacaacaattctacccttttccaacataccggctactgttgaatactctccacgacgtccggaagaaataccatccgtatatacaatcatcttggcagcatccataaaatggtcacagataccaatagcagcacccatatatcctccaccattaccttgcaaatccaatactaaatcctgcatacccaacgctctcaatttcttgacagcctcttcaaactcctctatagtagtagctgcaaaacgggaaatcttgacataaccagtcgtattatccaacatataagaagcatcaacactataaataggtatcttatcacgcacaacccgaaaatcgaacagatcacgacctcgtaatactttcacattcacaacggtccctttctcaccttttagacgtttacggacaccggtattgctgatatttttaccggccacattctctccgtcaatctctataattctatcccctgcacgcatacccaccttctcagaagggccgccagccaccacatcaaccaccatcaacgtgtcgcgcaaaatggcaaactgaataccgattccaaagaacccaccctccaatggctcattcatctcatccacttcttctttcgaaatataaacagaatgcggatccaaatctgctaatactttcacaatagcatcttccgtcagcttatgcaaatccactgtatctacataaaaagcatcaatcagagccatcaaacgctgatatttgatactttgatcacgaacctgattctctcgctgttgcgcagagaccgtatttatttgccaagcggcaaccaataggacaacgcctaataccaataaaaattttctcatcatatcgtctatttactatatttatcaaattccaatatttccaagtcctttatctctcccgcttcaatcacaaaacgcacagccgtacacactttatgaaatccgaacttacctgctgcacccggattgatgtgaagacaatccaaagacttgtcatacatcaccttcaaaatatgtgaatgcccacacacaaaaagcttcgggtgctcttgttgtaaagtcttccggatgccggcttcataatgtcccggatatcccccgatatgcgtcatcaccactttcacgccctcacattcaaaacactcaatccctttcaacatcaagcgaacctcttctccatcaatattgccatacacagccctcacacgaaaacacttttgcaactcctctatgacagacacagtcccgacatccccacaatgccacacctcttcgcattctctaaaaaactttactacccttttatccagccatccgtgcgtatccgacaataatcctaccttcattgcattgcatataacatctctatctcatctttccatgcctcttcatccggagtttccaatatcaaagggatattgtcaaaacgactatccttcatcaacatccggaatgtatccaagccaagctctcctttacccaacaattcatgacggtctacccgtgaattcaatcctttcttagaatcattcaagtgcataccccgcaaatactgaaaaccgacaacattttcaaaatgttcaaaagtttcagtaaaaccactttcacttttcaaatcatagccggcagcaaaagcatggcaagtatccaggcaaacaccgacccgtgatttatcctctacacgctcaatgatataggccaactgctcgaaagaatatcccagattagaaccctgaccggcagtgttttcaatcacagcacatactccctgtgttttatccagcgtcatattgatcgattcagcgattgtccgcagacactcctcttccgacactttcttcagagaacttcccggatggaaattcaacaacttcaatcccaactgctcacaacgctgcatttcatccaaaaaagcagctctcgatttttccaaggcttcgctgtccggatttcctaaattaatcaaataactgtcatgcggcaagatatgctctgcagcaaaaccataatcctcacaacgttgcctaaacaaccgaatactattctccgacaaaggtgcagaaacccattgacgttgattcttcgtaaacaatgcaaaagcctttgctcctatcctttttgcattctcaggagcattttccactcctcccgaagcactcacatgcgcccctatatattttcccatcacaataataatttaatagtctaacatctgcaaagttatacatttcccacacaaagacacttaaaggaatataaaaaaacaatggcaacctgcttaaacagattgccattgctatcctaacagatatcacctgccgattatttaatcaaatctacacttctcttgacaaaatggttcaaagcctctcctttcaacagaccattagccaaaagtgccaagtcaatcaactgacccacaatcttgttacccttgctatactcctgcaacaaagattgcttctgtttacggagattctccaatttatcagaatattcttgtttacggtctttgtccacctgcggaatctcttcttctttcttatctttattcaaagcgtcaatttcagcttttttgctttcaatatctttcatttcagaatctatcggctgcaatttatctgccattgacttacgctcatcttccaagacacctttcaccaacttatggtctgtattcacaaccaacgtaaactgatcgctcatcgctccatagaaacccatacccggattcatggcagccatctctttcatacggcgcataaactcagaacgggtaatgacaaccgggtcggcattctcgcccaacgactcgaaattcacaatatacataccgccttctgtcggcaactgagcattaaatacatcacgcatctcatcctgttccgcctcgctccaggatgttcccttcacatcttccttggcaatcaatttatcaatcacatccgagtcaacccgcaagaaacgatggttagcctgcttctgttccaaatggttgataaaatgagtatccaactgaccgtccatcaccaatacatcatatccgcgctccttagctgcctgaatatatgtatattgctcctgaacatctgtagcatacagatacactacattcttatccttatctgtctgattggctgaaatcagattttcatattcctccaatgtgaaatatttgccttccgtattcttcaacaatacgatattgctagctctttctgcaaacttctcatcggtcagcataccgtattggataaacaccttcaaatcatcccatttcttttcataatcctcacggctgtttttgaaaatatcagtcagactatctgccactttcttggtaatgtggctggaaatcttcttcacattgcggtcgctctgcaaatacgaacgggaaacattcaacggaatatccggagaatcaatcacaccatgcaacaatgtcaaatattccggaacaataccctcgacagaatcggaaacatatacctgattacaatagagttgaatcttattcttctgaatttcaaatttattgtcaattttcgggaaatataggataccggtcaaattaaacgggtaatccacatttaaatgaatatggaacaaaggatcctgactcatcggatacaattcacgatagaacttctgataatcctcttccttcaagtcggcaggcttgcgggtccacaacggatttgtatcattgataacattatcctcacctgtttcctcatacttaccatccttccactccttcttcttgccaaaaacaatttccaccggcaagaacttgcaatactttgtcaacaactcctgcaccttattgtcttccagaaaatccttttcctcatcggcaatgtgcatgataatatccgtaccgcgttcagccttttctgcattttccaatgtatattcggtatctccttcaccaatccatctcacagcctgtgcaccctctttataagatttagtgacaatctccactttatcgctcaccataaaagccgagtagaaccccagaccaaagtgaccgataatcgtagcagcatcatccttgtgtttttccaaaaactcctcagctcctgaaaaagcaatctggttaatatacttctccacctcttcctgagtcataccgataccattatccgataccgtcagagtacctgccgctttgtcagccttcaccaccactttcaaaccggcagtttctcccttaaactcaccggcagaagccaatactttcaatttttgggtagcatccaccgcattagaaacaatttcacggaggaatatgtcatggtctgaatacaaaaacttcttgataatcggaaataaattctgtgtcgatactcctatctttccactagccataatattatatttttagttattaattacaaattcaacaacaacactaacacaatagccatgccacaagcgaaaacgtgacaaaaagacagacaaaaggcaaagtccatccataaatacgcatttacacgtaacagattttacataaaaataagttactttgccacccgaaattcattagcaataaaaataatacacgacaatgaaaaaatggttagcacaattcaagacggaagactgggtagtagttgccgtcagcgcagttttattggctcttgcagcccttattcccaactacttgccacgcattcccaaagacctgctcagttttgaaaactggcaaaacacactttatctctttattatcgtactgggagccctctatatcggctggctcatgctcggcaaaccgctcaaaggtctgtttatatcgttgatggcagtattctctgtttcgcttgtcgcacaaatcgtagcagccatcccacaagtgtcttattacggatttgaatccgtatttttctccgtcatattcggtctcctcatccgcaacctgtttcatgtaccggcttggatgaaaccgaccattcaaagcgaatacttcatcaaaatcggagtggtatgcctcggtgccaccattctcttcagtgatgtcatgaaatccggcactatcggtctgctccaggctttcctcgtagtcagcatcgtatggtttttcgcctacaacgtttcgcgccgtctgggtgttgaccaacgttcagccatgatactttccagcggagtatccatctgtggagtatctgcctgcataacagcagcccgcgtagccggaggcgacgaccgcaaactctcgtacatcgtatcacttgtcctgattatcgtagttccgatgatatatctgatgccgtggcttgccggtctgatactcccgcatctttttgacgatccgaaaatcgtacaggaagtcaccggagcctggataggcggcaccatcgacaccaccagtggagttgcagcttcgagtgccatagccagcgaactttccaaccaacatgccatgattatcaaaggagcacagaacgtactcatcggtctggtagcctttttcatcgccctgtatctttcaacccgcggagaaaaaagcaacaatgccccctcattacatatcgtatgggaaaaattccctaaattcatcatcggatttgttgtcgcctcattggtattcagcatttgtcaggtaaacgaagtattccacctcaatgccaaaggcaagctcgttgagccgggagttgccaaaatgttcagctcactctttttcagcctcgcctttgtatgtgtaggacttgaaacccgactaaaagacatcatctcacgcgagaaccgcaacctgatgtggtcgtttcttaccgcacagacattcaatatcattgtcacattcattattgcctgcgtactcttcggcatcgtaaaaccgatgtggggataattcaaaataaaaaacgagggaatgtcaaacattccctcattttttacttatttttcaagcgtacagcaagcgtatcctgcccgacccactcaaccgtgccgccctttctaaacttattaaaaaactccacataatcatccaccgacacaatactgtcgttcacataaaacagtgttgtatagtctgtcttgacaaaaccttctcgctcccaacaaacattcccaaggctctgtatcattttcatattgcccagcgaatcccaatataccaatgtgttcaccttttttgcctcatcatccaaaagggtcatcataacactgtcaggattgcagatattctccaaattattaaatcctactttcactattcccttgcggctgttcaccaccagtctttcctgtcccatcctattctttttcaggctatattccagactatctgtctcatcaagcgaagaaaggaaaaacatatccgtactaaaattacaatcctttctctcaatcgtaccatccgtcatcatcgacaaagttgaaacgataaactgtccgttcttgccctgcttcgttgtgtaatcgaagactacaacatatccctccttatcctgcaaaatatccgccacctccagttgcaactcctcggctttcactcccccatgaaacaaagcaaagtcccttttgaccgattcaaacccatccagcatccaaggttgagtcatcacctgattaaaaaccacttcactcataccttccggcaacgactctttctgattcactgcctgctcgccttctttacatgccgccagcaatatcaatgccgcaaaaataaataccagattcttcataatctacatattactaaaaaaccaacctataaaaacacttccttttaacagtagcacataaaatgtcgcaaacgaaagaaaaaataatacatgtgaattccgctttgactcacgaaaaggataggctatatatgataacagcaaacacggacaaaaggcagtgaaaaacaatgaataaacaaaagcctctccttgcaattcattacacaatatccaaaacaaggtaaaataacagctcaaaaaaatcaacagaaatttaatccattcaattttgggagccaaccaccgaaccggaaaataaatataacacaaagtacagataattagcgccaaaaaatcccatgcgtaaaacataccaaccgtaaacatagctatctcctaattatgataaaactttcttaccttcaaatatactcaatataccatacaacaatacatacaacataaacaacgctacagtactgaaacagccgacaaacagcacatcaccacaacagagcgataaaacaatcgccataaccgtatccacaacaacagcaaactgtattgacctcaatttcaactcccgactacttttatctcccattgtatgtacaagaaaaaggactaatcctgctatcaaaagcccgacataccattggtcggcataaacattcatcgacaaccagtctgttgtctctgcatttgcagtcaacaaccaatatccccacgctacacctacaagcaaatacaatacacccaatacaataaacaaacgtttcataggaactaatttaattaaacaatattataattaatctctatgacaaatgtacagcatcctcctcccctcaacaatagcgaatgttagcaaaatgttagcaattttatcgcaaggaaaatatgtgcaaatttaaactatctgctcaatataaaattgcaggaagaaataatttacgaccattctttatttagaatggtaaatctccatacatcatattggcatcttcttttaccattgaaggaaataaagaatccagcaactgaatgtctttaatcttagaacgatatttctgatataattgtggattttccaattcctcacgtctatttctgcttatttctatataattctgttcttggtcaatacccaaaaaacgacgtcctaatagattagaagcaatacctgttgttgaacttccacaaaaaggatcaagcacccaatctccttgttgtgtagacgccattataattcttgacaataatgctaaaggtttttgggtcggatgttttccacaggatttttcccatggagcaatcgctggcaaatgccaaacatctgtcatttgcttaccaccatttatatacttcatcaaatcataattaaaatagtgagctttcttatcacttttacgtgcccaaataataaattcagtactataagtaaaataacgacatgaaacattaggaggaggattagtttttgcccatgtcacaacattcaatattttataccccaattctgtcaaagaactagcaacagaaaagatattatgataggtgccagaaatccaaattgttccattatcttttaatttatcacgacaaagactaagccaccccatattaaattccatgatttcttgttgactcttacccctatcccattctcctttatccacacacacaatcttacctgattggacacttattcctccatttgataaaaaataaggaggatcagcaaagatacaattaaacttgaagttaaattcgcttaacaattgaaagcaatcaccatgcaagagcgtaaaagcacggttaggggacttataataaggtttaatcattattgccaataaatatagccaaattcacttttacttcatataaaaaccctcttttgacatttccactaccaacacttttctgtatcataatctttcctccttcacttgcttaataaactcattaatagttgtaagattatatatattaggtattacataaaatgcttcttctaatttattcttagcagacttccaaccaataccatcagtaatccaaacaaattcaaaaccatctacagcattaattttaggagaaagctcagaatatgcacgagcaacctcatttaatttagaacctcctccactataaaaatttacttctatcaaatacttacaatgtcctgtttctatcacaaaatcaaaacgctttttatcctcgcctaataccaataattcaggatattcggtagaataaacttcttgtctgtaagatactccagcattatctaatatagaggcaacctgattttccattaaatgaccacttctattcttacgagcattagtatcaaggcctgtttctacaccaaatacataatccaccaaatttttaatttgcttatttctaaaaacattatcaagacccgtaccatgaatgtattctataacaccttcaacactatcgaaaagagtatttatcaacttcacgtttccatcagccattatggccttcttcttatcagatgtacgaactgctattaatatttccaaaacattgaacacacccttattttcattccaaagcctgcgaatagcagcatcaatatcattttgcccaatcaaataatttaattggttcagcttaatggatattgtttcgacattataatttattttttcaaaatcacaataaaaaccaagagtagcatttgtctctttcaattgtgacataaattgttcaaagtattcctttgtgtgtactctcataaatattccctcaatataaaggttaattatagtaatttcccacaactatttctgtcaactttcccctcttagaagctatggcatttacatttcttgatgcccatactcgttctatccgataatcaataaataaatcatcaaaaaaacggtctgttccatctttacccaagcaatcagaattactaagcagaaaattcacacctatttcattcaaatgatcacaaaacaatttcaaacgaatttgagcatcatcattaaactcctccttcgcataatcattaaagcttgaagtattactaagaggtctataagggggatcaaaataaaagaaagtatttccttcgatttttgctaaagtttgctcaaaatctcctgtcataatatctaccttctgtaaaagattgctatctgcataaattgtcgcagaatcacaaatagtaggtgctgcatatctaccgaatggtacgttaaatttacctgctttatttactcgataaagtccattgaaacaagttctattaaggaaaaaaaacaaagttgtattctctatcatatctaatgatttagaattaaaccgctctcgctgctgtaaaaaaaacatcttacgttcttcttctgttcgaagagcataatattctgtctgaatagcatctagagaacctatcaattctgttggattatcccttaccacctgataacacaatgtcaaatcaggattaatatcatttattacagctgattttatatttggatatgtctgtaacatatagaagagcatggcacctccccctacaaaaggctctatgtaagtgacattctccctttctgcaaagtcagctggaagcagagcttcaagttgttcgataagttgacctttcccgccaacccacttgatgaaaggttttgcttttgccattgtattgtatttagtcttatcaatttagaggcaaagatagcaaatattaccattactaataactagtgccctgtcaattatcaacttgattcttgaaatactcctctttcgaacgcaagaaactttcctttaaattaaaatcatcctccaatcgaccctctttcataaacaattttatgccacgatttgtctcctcaagagattctttcaaaagagcttcataaaccggactgatatcatgtttttcccaataatctttctctactttcagtaccagtttattgtctataacaaccactttttcatagaccaaacgttccagttttttctttaatgccatttgttccactgtagcagaatcacttgaaatcatcaatacggattcttccatgcaagtggattctgactatcatttttacaattcacgaacagaaaaataacacacaataccaataatgctttcataattttcagttgttaagttagtatccaaataagtcaaaatatctatcttaaacaaatgtagtacaccattgtcacattcattattgcttgcgtactcttcggtatcgtaaaaccgatgtggctatatttatcttaatcatatatttacatattccgacaataataactcgctctctcacccttaatctctttacctggtttatataaaccttgggcatttactcctatgatactgcaacagaatagcgcccaaagcaacgatttcgttttcagggcagacgctgttttattttctagttccaaaatatatttaatgaaaatccatcattatacactattttgaatccgtcatcgtctacatagcttgttagcatatgcgaatcgtatcgcgaaagtcccatactgcctaatttcttccagttcctaccacgatcagaactatagtaaaaactctcatttgccctaaaaatattttcaatcttaaaaactaaataaatatagatttcatctccatgaatccctacatagtcaacagaaataaactctctgtccttaatggtcgacaaacgggtcagggaaaagtcgtcattgattctatagatatccagctcgtccgtttttccttttgtgacgaatatgatattctccttgcccactgccacatttgaacctgccggaagacgctgcattttttcctctcccgtatataaatcatatctcacaagaaggtctctctgtagcggttctttaaaataggatagataataggcatacctgccatggtaaaattcatctaaaaccctgtaacttgtttttaatatatgccagttttttccaccatccttcgtttcacgcaatttgtatccaatgtaaccaatcatccaattggaatcccggacatgcagtctcaccatgctaccttttattccacatttgaatgtccagtccgctccgaaattccgggattcgtaaataaaggtctcatacccccgcttgttgcttttaggattcaccactgcatagacgatattgtctttaaccacaagttcttgaagggctccgtccgtcagcttctgtgaagtccagttcctgcccccatcgatacttctccagcacattgcatcaaatattccatatccgacaccttcggattgacgagttttcaaattaattttcttacttacacaccccccataagtccaatggaaggacaagggaaaagaatgcaatctcgagattctccataatccaaaccactctcaacccgaattttctgccggtttaccggactgcatcccgataacatcaatatcagcacgataaaaatatatctgctcataattctgtcaacattaagtttcactattcccttccataatcccttatctacttattttcttctgcccaatactgcttcgtccggtatccaatacgtcccagatggaggagttataaatttaaaggatatggaatcttttcccacaaatactatcttggcgattcctggcttgtctgaatcgtaagtactttttacataaacagtcaattgcccatcctgcactgtgccacgaatagtcaaattctcttcatctccctcatctatccgattcccataattcattacagaagcgtgataaccggtaactacagagtccacctgggtcaatgtcagcgaaaacacactggaatctgtctgatacacccattctccgctataatcctgctcattgtatgcacaaataaacaatacaataattgaaataactaacattttcatacctaatacctaatattaatataaaacatctttaatcacaaatataaataaaataaatgcaaatttaaagtatttctaacaaatatctcataaccagtatatttacactaatccgccccctctagtaaacgagcaaacactgctgcatctatctcaacccaattggatacaagatctacatacctatatccagacaacggattattcttgtttatatactgcaactttgtcaaagtatacctaaccttcttaacctttgacactctttctttattattgggggaagagcaccaaaaccaaaaatatcattaaatataggcatatcaataaatatactttcgccaggttttatcactaatattcgcttatcaccaaaataaaaagattgcgtaggtctacctttggatatttcgctttgatattttatttccctaaccaaataagtatgttcaattagagctccactatattttacaccctctttaaaaatataagacgaatccgtattattggtaagagtaaaaagaaaataagtatccgtatctatctttccggatggatttatctgctcaaatttaactgaaaacggactctgtgcaaacaaagtaaatccgctgcaaataattatcaatgataaaaacacattaatctacatatcttcatctttatagttcaaaatatcaggcaaaaatttattacgtctgcctgccaaaaatacgacaccactttctcctttcaccaacaatccatccgttttatcaaaactatactccaaactaccgccattctcatccattataaaatacaaatccgtttcaaaatcatactctgttactgccatggactctgccataacattacaatcagccaccacaaaacgaccagcgtctccatctaaagttttataatcaaaaacaacagcataccctttctcaaactgaaacatatccgccaattccaactgcaactcctctgcttttacaccgccatgaaacaaagcaaaatcccttttgattgtttcaaaaccatcgaacatccaggattgagcaagcacctgtttaaagttcatttcatcctcattatacaacaactctttctgatttacattctgtttgccttcactgcatgccaacaaagacaatgcacctaacaatacaataaacaaacgtttcatagcaactaatttaattaaacaatattataattaatctctatgacaaatgtatagcatcctcctcccctcaacaatagcgaatgttagcaaaatgttagcaattttacttcaatgaaaatccatcattatacactatcttgaatccgtcatcgtctacggcattcccacccttcaacagtccccgtcttggaagaaaaattcaccccgaccttatacaaccggcgggcatcggattcatacggacgggcataacctttctcctctatctgccgtaatgcatcggctgccgtgccatccaacttgaattcgaagatatacacatattgaggcgtttcaacaatgcagtccacccgaccttcgctctgctccttttccaccaaaaccgtataaacactcatcagacgaagcaacaaataaaacgtatagtggaaataacgctcccgttccggctcgttgtccttgcgccgcatgctatagggaatacctgccaggaaagaggtcagcattttgcgaaattcttccaattgcccccgctttaacgcaaataccgctttcaccatccaagactccaaaggcatacgacattgcagatagttcgtcgccaccattgccagaaaaccgctcttcacctcattgttgggaaaatcaagcaggaaaaggttcgaatccttgtcgtaatccttaatcgtcagataaccgctctgataaatcatcggcaatggatactctacatctgccttataattgataaactcgtcaggaagataatacttattggtcagttcatcaatcccctcatggaaatgattcatcaaccgaatcaaataagatggcgtaccgctggtgaaccaataatcacgaatatccttgctatcgaaagcattcagcagactgaacggattataaatatctgccatattcttgctaaagtgataaccgtcgtaatgccgcttcaaacgcaggcggatttcctcttcgctacaaccgtccgactttgccatctcacggataggttctgcaaactgtgtatacagttcctcttccgtaatgccacaaagagcttcatatttatcaaacatactgatatccttgggttggttgaaaccactgaacacactaacctgcgagaatttggtaacacccgtcagaaaaacaaagcgcaaagatgcatcagcttgcttaaacacggaataaaaagccttcaatatatcacgattccggtccaacaattcagggtccctctccaatacatccagcaaaggcttatcatactcatccaccagaaccactgcaccccgtcccgtctgctccgccgcaacctgcaagattcggttaaaacgagagccgagattggtatcgatttctgatactatcccaaactctttttcccatccgtgcagatagccttctattttcatttgcaatgcacccggcaatgtaaaatcgacaccgttaaaatcaaagtgaaacacccggtgcacatgccaatcctgctccaacgcatcgattttcaagccggcaaacagttccttctttccctcgaaataggcacgaagagtggaaagcaacagacttttcccgaaacgccggggacggctcagaaaataaatttgcccttctttgactaatgaataaattaaatcagtcttatccacatagacaaaaccgtctttaactattttctcgaatgtctgtatgccaaccggatatttcatagatctcctgcttttaaagttcaaaattgaatttatacaaagttaagcaatttacgagaaaacaagtttgtttcttttgaaaaaaaacattaatacattcattcctctttacgcaaatcattcataccttgccgctcctccaaaaaagaaaccttcaacaaatcttttgcctcacgcttgattcggtctactgtagcggaagggacctttacctgcttggttataatttctaacgcaacgcattctgcctctttcactttgccttgcaaacgataaagtttcatcaagcgataaagcggcataaagcggttcggacacatattcgaagctttcaataaatgctctttcgactgcccatagtttcctaatttttccagactacccgccaacaacatgtgtacatccatatcgttccagccggccaaacactccaacgtaatttcatgactttctttccacaaacccagccggttcagttcagcaccataattatacaaaaacaacggatttcctttcatcaccggatacaaccgagcatactcatcatgcacctgttctgcattccccggataagcatcttgcgtcgccttccaccactcatactccttccaatgccaaaaacaagaaccggcaagtacaagcaaagcaacaatccctatccccaacttgcagaatccattccccaatgatatacatttcccatcccgcaatatcatccccaacaaaatacatgccgacacttgtatggatggatagcttaacggataagaaaacaatccgcacacaaggagtcccaataatccgacaaacaaagggaaacgtcttctccacctctgactgaatctcctccatatcatccataatcccacacataccgacaacaacccgacaataccgaattctgcacaaatcttcaaaaattcattgaaaggatgctttacattatccgccagcaaaggccatttcccgtcaggatgactttcaaagaaatccgcctgataatccatatattttgcattaaaggaacctatcccatgcccgaaccagggagcgtctgcaatcatgtctgccgtacatttccatatcaacaaccgcccgtcagccgaatccttcttccaataatataaaacaataccgcccgccaccaaaagcactgccattccaacaaaccatctgcgaaccgccacattcttctttccccaaacataccaaccgattacaaaactttccacagcaataaccagcatcccggttcttgcccccgacaagactactgcaaacacaatgattccggccaaacaaccggctaccagccgtctccacttcaaaacatcacggaatagatacagcacacacggaaaagccaatgccagataagcagacaatccggcaggattatcaaaagaccccaccgtctgccattgcattccattcttcaaaactcctgcaaattgccccaatgccatcaaagcctccgcacctgccatcaaagcaaatacccaacagacagaaaagaatgacagccgtttaccggaattgcaaacaaccgccatcagcaaaaccaacgcaccgccatacacacccgactgccacatccccctctccagcatatcccacactcccaagcccatcaataccagacagacaattccagattcccaagtacaccacattttccccttttcaaccaccctccacacaatcgtcaatacaccgaccgccattccaacccacaacattccggcagtgaaaaagcgatcggtgaaacaatgcggcacataaaacacattcaacgatatgataacaagaaaaacaagataaaacaatttcatctatataaataataataaattacacttaaacaaaacattcaagtataactattaatttttaacatgcacgatgatacaatatcttacatccattttccgtcggctctatacgcatttcataacatttacccccatattttttttcaatctcctcggtagctttttttgctgcagcaacagtacaaacctctccatatcttatccaggcagccccactttccgagcgtgtctttatcaccgaattatctccaatgtcatcagaagtaactttaaccaaaatctcaccggaacaactacgtaataccatggtcttttgagtatcttcaatagaaaaaatcaaagcagcaatatactcacaatcagatgttgccaaagtcgtttctttaacatccatcatttcttttttatcagaacaagatacagtaaccatacttacaaccaacaaaagaataaataatcgtctcatagtttcaattattaagcaataaaacattttaatccatgacatatcccactatatgaagctgatacatctttttccatatattacagaccacaaatacagacttcttaaaataccctttattctcacccgtaaagacaacctgaatactatctgattgttgcgacaacaagggatttttatcccaaaccacctccgtacatccgcatgtagcctgaacattcctaattatcaacggatatttccctgtattggtataagcaaattttgcaggaaccttctcccctatttttacacagcctaaatttatggtgtctttttcaaatctgacagatgtgtaattccgggaatcaactttctcttttttagtatccacacacccccctgctattcctacaaaagcaataaaaacaaaatataacaaaccgcttttcataaaaacaaataatcaacaatagaccaaaatgacttgatagcatatcaatacttcgatacactaccaagtctttttttaataatcaattttgtacaatcatagttgtgttttacaattaaaacaaataatatcttgccctataaagtcaatcgttccttgtttactataattattaaacacttcaacatacttttccttggttactaattttccatccacataaaataatgcaaccgaagattcaacaacactaccgcttcttgtgtgcaactcactttcctgacatatttcatactcttttacattcaaatgtccgacagaatccttattaatggcagtaaccaaaagattattagactttaactccacagatttatctgaacatccccaaatacataaaatgcccaaacatatcgtaaatataattctactcataactctcaatatattaatatttacttatcgacatagaacacgaagccccccatcactacctgaacgacatccacatttataactcaattgcccgttataatttcaacgtcacatttgtcccaactttcaacgtattatcgtttattaaagtatcacaaacacttattatacatacattattgtctacctcacaatccataaatccatcctcattcattggcattgcaagaaaatactttccttcaaatttacatgtcaccacagccataataccttcagtcccaataggaattgttgaaacaataaattcacccttaatatcatcaacagtagaatacatacattcataaaaagcaccattcggtgtatttatagtatctatagaaataatatcaaaatcctctattttcaaatttccatgaaaatcagaaaatgcttttttcaactccaaacaatctgttttttccgaaattatttcatcatttcctgtttgcttatctgcacaagcatatacgaaagcacatagaatcaaactaatacaacaaatccatttcattttactgttcttttaagttgacaatcacttcctttaccagttcttggtctttgacaggcacacacaaaatttccgtcaccaagaatttctacaacacattttttacaatttccattaataggaacacagtcaagctgaacaattacaggatcatcagtttcagaccttgtcttcactttattgaactgtatccaaattatagtatttgaaacatcatcaccaggagttacataatatatatctgcaatcatctcgtttttggattccaaatatttaatttcaacaatttcgcaattatcaattcctatatcacgcttcaattcattcatatcagaagcaattctaactccattaggagaaactaaatttatagacttttccaaatctgtaattgcttcattacatgcatttttatcacatgcatatactacagcaaacaaaagcaataaaaaacatatcttctttatcataacatgtcaagtattaaatcattatatctatttttttgcacaaatactaattttacaagctccaaatattcctatccttatccatcaactcctcctttgtatattctctggaatcatattccaccttatcaaatctcttgaacttaccttccgcatccacttcataaatctcatccagacggtatgcctttactacactgaaatcatccttgaaaagcacctgttgtgcaacatcatccaacttcaatgaagatatttgtatactgcctttcgcatttatacgccactgtttcatcgcaatgtcatcattcgaacgaaaacctgcctccagaaaatccgtcaaactaccgtttttaaaagccaacatcacatacctcatatactcatcacgctctatcgctacaaccacaatctccaaaccctcaccttgcggcaaacggaaatgacggaatatttgggtaaacgactcttcattcgtattcttcaatctcccgttcaaatctcgataagaatataaaggaagatctttgactttcgacctgtcaatcgtataggcattggaataaggcgtgcccttggcacaagcaaaaggaagaggtgttatcaccgcttctactcccgcaggatacaggtctttcaattcctgcgccatgcccgtcaagcccaacagggcaaacacaactgaaaacaatacttttttcctcataactttttaatttggttaataaaactaacgaaatcatactctgatttcaaaacaaatttagagtattcattattccaaaccaatagcgaatgttagcaaaatgttagcaatttcttgccgtatttcaaggtatctcgataaatacaataaatcataaacattcttatcacatgcatatagcatacaaagcactgaacggtaaagtgtctgctatttctttttcttcaaccaatcatcagtatgccccggttctacattataaataaatgtatcgtttattgtttttataaccaaatcacttccaaccagtccctctatttcaattctcgttttaagacggccatcaacatgcaagctaagctttttgccatcattaatgattttccccatcttggagcgatcttgccaataaatatcaaaacctaaaagataactatccgtatttacattaattgttctaaactctaccgctcttttttgtgttatattataattatatccggcacttacgtcaacatacatcatacagtttccccaaggttccttataaaaagtatgtgtctgactacaaagatcaaaacgatccgactgactacctccgatactgccacctatatgaccgcctcctccgatactaccgcctcctccgcctcctccgataataccacctccgatattgcctccctcagaacgacttttcaatcgtggagcagtttcatgcaatgcattattatcttctatcgatgctgtcaaaagccatgctatggctttctcattcatctctttctttttattttccagcatccgattgtccgtttgataccctgaaaccggataataactcatttcatatttcttactcaactgacaaaccaaagcataaccctcttcagacaacgaatccttaacccacgcaggaatcacccctttaggatatacgacatcctcatctaccacgcatttactgatacatacagaagaagcattttggctgttgtctttttcaaaaccacaacatgaataaagaattattccaagcagtataaaaacataaactttcataaccaactaattaagagtaaaataacaaacaatcacattatgaaatattctacaagctccaaatattcttatccttatccattaactcctccttcgtgtattctttggaatcatattccaccttattcaatctcttgaacttcccttccgcattcacttcataaatctcatccagacggtatgcctttactacactgaaatcatccttgaaaagcacctgttgtacaacatcatccaacttcaatgaagatatttgtatactgcctttcgcatttatacgccactgcttcatcgcaatgtcatcattcgaacgaaaacctgcctccagaaaatccgtcaaactaccgttttttaaagccaacatcacatacctcatatactcatcacgctctatcgctacaaccacaatctccaaaccctcaccttgcggcaaacggaaatgacggaatatttgggtgaacgactcttcattcgtattcttcaatctcccattcaaatctcgataagaatataaaggaagatctttgactttcgccctgtcaatcgtataggcattggaataaggcgtccccttggcacaagcaaaaggaagaggtgttatcacagcttctgctccggcaggatacaagtctttcaattcctgcgccatgcccattaaacccataagggcaaacacaactgaaaacaaaactttctttctcataagattttaatttggttaataaaacttcagaagttatcttctgatttcaaaaacaaatttagagtattcatcattccaagccaatagcgaatgttagcaaaatgttagcaattttacagcaatgatttcaataatcttctgccatatttcaagtttccgaaataaatggcttgacttttctgtaaatccaatacataaacatcgggaaaagcatgaggttcctctattccccaatctttggtaaacaagagtacaggaaaactgaacccttcaatatattgagatgcaacctgtttccaccgttcttccgtcccacaatacaccgaatagaatcgacaatgtgggggacaattgtcatacaactcctgcaactcaggaaacttgtctatgcaaaaaccacaatattcagaccaaaaatagagaagcacatagcgacaatcttccggtaacgtttcctgcttgccgtcaatggtttccaagttatcaggaaatgacactgacatctctactctccctgaaagcgaatgataattataataatgtaaatacatgtcatatccttcgaagtaaacaaatacaggaatacatattgtcaataccaaaggtgcaatacgtttttttccttttaatttacaatacagataagccaatatgactgctataaaatgaacgattacatccaataaacttatcagcgaacctgtatatgaaatgataaaataatcgtaaaaccgtaatgacgcatccaggccaaaagctccgaacaacatggcaaacaatatcttttccaaagacattctatcaccaaacttcttcacgtaaaattgatagacaccaaagtatatgaaaggagcaatcaaagaactgactttaaaaccgattgcccgcaatggagacattaccaccgcaagcaaaaaagtcgcaaaaatgattattagaatttgctttaaatatttgattttcatacgaccaattatttatgtaaaacatttcattttttcaacacatttatataaactacaaaccaatataatataagggaacctgtttccaagttccctataaaaaacaattgaacggattattccttttctaatcttttagtttatatgcaacactcaagcccggaaaaacggtattgacggaggccatgcccgaaaagattttcccttggctaaagttatgaatattataaataacggataaataaaattcaccaacaaccaaatcaccaatgcccacttcatatacccccaatcaataacttcacctacactccaatattcaacggcacgataccagccaaataagaatacccctaccataataaaagaaaataacacttgaaaattcaacaaattacaagcctctttcgtaaaagcgacatcttctgttcttcgattcagtttccagtaaaaataaggaagcaaaacaccccccaaagggaataaaaaattccctacaatcatccaaacatacaacattaccgtttttttcataatcataataattaacaagttagatataatcaattgcataaaaaattaataaaacttcatttttccatcttccacgataaaaatccgctcctgcgttccggttgtcagattgcgcaaccaatacaatccgcccgacggcacactatcgaatttcaggaaataaccttcggatctttcggtgcaaacagtattccatcgcccgtctttccaataacgcaactcatatatattgccgggaaatattccgtttccgtcattcaacggcatatagcaaacggaatccaatctgaccgccttcctgaaatcgaaatcgaccactccgcggaaactgccgtaagtcaacgggtctccgtcaaaacagacatcagccgattccattgccgccacatcaaaatcgcttacgctttcaccatcgcgcataaagaccagttctgccagattcattgacgaacaaggacgtatcctccaataacggtaggccgtatcaggacaaatcacgctcctcctatccatcaatgtattttcttccactttataaaatacttccgaatcgctaaaatccggacggttggcacattcaaacaatgtccccaccatggaactcccgcctgctgcctgatggttatagggatatttgcgatatgccgtaaaatccataagcaggtccgtacacaccaactcccgcacttcaccataacggcccagtatgaaaggattcccaaccggcaactgtctgtcgtctttatagcacaccggcaaatagacgatatcatatcccaacttgtcaaaacgtgcttttccatcgcaaggaaactctcctgccaccggtttccactccccacggttgaatacgcacaaatagactgccccacaatcaaggtatttccgaggtatatccatctccatgccggtagtcacaatgtagcgatcggtcacatctttccagaaagcaccttcgaaaaattcaaaatcccttcctgtattctcccataccctccgttcctcatgccggtacatcatcctgtagaccttgggaattttccggaatgccagctcttccggcattctctcagggaaaaaaggatcaaccactgttgcccaataatgggaaccgttagcattcccccaatacggcacagcatccaaagcacacggaattccgacagcacggaaaccataaagtgacaacaaagccctttcataacattccagcgaaaaatcagtttcaaaaggtgcaggcagccagggtacccaactgttatagaccgggggcataacctctgccaccatgtgcggagaatgatatatatcatcataacgtgcggtaatcagacgacagtcttcctgcttcaaccataaggtatccaataatcggggaatatcctccagacgctcgttttccaacctataaggcaagacgtaatcgcaaaattcgtcaaatgacagattccgcaaccagggcaaacgtttccatttggaaaaacattcttccacatgccgaatcaaaaaatcacccttcaccctccggatatcctcctcataaagcaaagaggggagcagaaattccgtatggcaatacaccgactgcatgacttggcacaaaaagagcttttgagaatacagactatccaaatcatgccggaaatccgccagaccggctcctccatacccataatgacccggcatatttgcaatcagaaattcacaggccttcaacttcagagaatcgcctgcatccccggaaaaataatccaacgctttctgcaactcccgacgattgtctccggcaagagccaaggcatcatcaagttgtcggttctcctgaagtccgcatgccgtaagcaaaacacatatccacaaataacgtttcataaaactgcctcttgtttatagaagcaaatataaaacactcattatcccatgccaatagcgaatgttagcaaaatgttagcaatttttccccaattcctctcacttatattcaatataaattcatgtcaaaatcatatcaaagataacagactgttatctttgtcttatatttgtcttatatttgatatatgtttgccatatatttaaatgggaggaaagaaagagggaaaagggagttgacaaagggaaacgcgcttttatcccaaagtgttgcctgatttggaaacttatttttatatttgcaaaactaaaaaatatataatatggcaggtaagatagaaaatataggtttgatgattcgcaatgaacgcctgcgtaaaggtcttactcaagaagaccttggagagcgtatcggagttggaaaatctcaaatttcgaaaattgaaagtgggaaaggacttacaatcaagactgtaacaaaagtatttaatgccctaggcatatctgcttctgtcatattgcaaaatatacaaacaattgataagaatatggttgcttatattattgcaaccatcaatgaatttgccaaggctcacaatatttctatccgcgaagcgaacaattatcttatacgatttaaaggtattgattttctaactgaacattataatgcagaacatttactctcatttgatgatagtgtcgaagatcttacacaaatctgtctaaataatggaggaggtatccgatgaaactatatcatggttcaaatattacaatcaaacaaattgatctttccatgtgcaaaccttacaaggattttgggaaaggattttatctcacagagataaagagactttgatgacggtatcattgatttgcaaacacttgtaaatggattaaaatacaaaaaggtttcatcacaatatttgttccactcggcagaagccattaaatatctacacgcaatatgaacaaacaaatgcaatatttagtggagggtataactaaagatatcatagtctatctgatacaggataatgggtatgatttgtctactgcccttaaagaattctataattcggagacgtttataaaactaacaaacgaggccaccgggctctatattgaaagttctgcttatgtctatgaaatattaaaaggtgaactgaaatatggaaagattatgatttaaaaatattgccaggtcaagtcattaacagctattattgtctgcatgaaaaatacggctccacataaaggaattattgtcacattaatgattatgctgttcatggcaacagtgataatccgaaatgtaaatatctaccgtttggaagccaaaaatttcaaacaggagatggagaaggcggtccggaccgggctcaaggagtatctgctgtcgcaggatataaaaacctcctatctgctttcacagacaccctcctacatcaagattaaatatatggtgggagaaaatttatatgttgtcaatccgcaaaaacaacagtacggcacagcctatctccgaatgcgctatgattttttccgcgaccgttggtccaccgacagcctcgccgcacaaatcagaaaactgacctcttatgcggaattgccagccacaattgtcaggaaggacgcagcaggacagattatcgattcctacccggcagactgctccattccttcagaaccggctacatttactatcgatggaatcggaaccgcctattcagattccatttccgtatggtgcgaaatgcctttcagcctattcaaaaagagacaaggctttttatactacctgaccatcatcctgcttcgttggtcgctgcttttctgttttctgattatctataaaaaccggacagactaccgcaaccggctgttgctggaaaagcaggcgattttcatacacgacctcaaaagccccctttgcaccaaccgcaatatcgccaaccatctgctgaaaaatacgacttcacacccgctggaaaagttccgacaaaaagcagagacattattacacctgtcccgggaaatgcagaacgaaatcaaccgttttctttttgattacgacacaatgccggaggcggaagattatcgggaattcaacctgaaggagatactgcaacgtgccattacgcaccattccgccgggaatgacatctccatttcgctggatttcaaacggactgacacaaattttgaaggatcggagtttcatatcgaacacatggtgaacaacctgctcagcaatgccatcaaacatgccggacaaggcaaaacgattcaagtagcctgctacacgacaccacagggacagacggctatttcgatcatcgaccagggagatggctatgtttcggcaacggaagattcaacggaaagccacggtatgggacttccctatatcagccggaacatacgcaggtacggcggttcgtttactatccgcaaccgacaggaaggcggcaaagaatgtgtcctcacgctctctccgcaaaaacgtgccggcacattccatatcccctcttatctttatatagcatttatcggactggtagtgctgcttggcgcattaggcgtgttacggctatataacagttatgagcaatatttattcaacaccgtgaaagagcggattcacaatgccgttgccaactctacccaacagtccatccactggagaaaagacaccacctttttcagatatgaccacccgcagggaacagtgaccgtattccggaatttgaagagcagaacgcttccgacaactacggtcagcacccgggattttgtccgcatggcatacgatttacgagacacgacatggagtctttattccgtgtacaaacactatctggaactttcccctaccccaatcccgatagagctggtccgtaccgactccaccggcaaggttctggaacggctacagtggtcgtcaaccctgttgtttcatccctacacgttcaatatacctctgggatatgtcgacggcgaccggttgcaagtgaatctttacacaccgtggagccggttcttcacacactatgcctggcaactattctttgcctttgcctccatcttgctgctatgctggatggcctatatactctaccaatacgacatgcgtaccaaagcttttgtccttttccaacagaagaaaatagtccgctttatcaagaatctgaaacaggaactgacacagacggagaaactcgaacaggaacttcatgctccagagcttcccgatattgaaataaaaaaaagaatgctgcaacaactgctcgaacactattccaacatgctgaacaaggtaaatctactgctcgaccagatggcaacattccgacgaaaacagtaattcataaaagaaacgataccatgcaaaacaaactgcgactgctttatgccgaggataacccggacacggcccgggaaaccgccgaagaactggaagaatacggttttgaggtgaacaccgtttacgatggtgacgaggcatggatagcctttcaggaaacaaatccggaccttgtgctgctcgactaccgcatgccgggcaaaaacggcttggaagtgttttcgctgatacaccgcatgaacccgaatattcctgtgctgattttaagctcgtatacggaatattgcatcgcctcgctgaaaaacggtactgccgactttatccgcaaggacgctcttatcgaagaggtggctctgcggctgaaaatggcttggaaacagagccggaatctgcctctgacagaaaaactgccggacactcaggaaatctattacctcagtgagaattgccggtataatgcgggaaacaccacgcttttcatcaatgaacagcccatacagctcacgacggtccccggcgaactgctgacagtattatgccagaatcaaaaccattatgtatccaaacagactctctgcaaacggatatggaatgtatataacagcggaaagaccaccagtctgcgcaactatatttcggacctccgcaagatgctggaaggtgcagacactattgaaatccgctcgtcctacggaaaaggatattgtctgaaaacattgtcgatgatataaaaaaaacgcagcctgctgcttgtcagactgcgttttccggtataatataaagtagattagtcgatatccaattctacagtataggtcttgcccggctcaaaatcggcattgtaaaccaacaggaagttctcatccaatgccacattccagttctgtccggcagccagacgtggattgttcagacgctgcgggaagaaataactgaacggcagatccaatacgtgttcctgtttgaatttgtcacctttcatacgctccagactgaaattctcttttgtggtgatggtgatgatacattttttacctttcacttcggatgccacagtgaagtctgtctcttccggaatctcctgcaaacgaacgttccatttcggatcaccgtaataagccagcacatcacgatcatggaagaaacctacctggtctttggtcggctgaataccgattgaatccataatcagctgcggagcttctgcaaattcattctgagaatcatacggatattgcatggtcatgaatttagggttccattcgttcaactggtgaacaaaatcctgctggttcatgaagaaagcctctgccacggaataacgtccgggattggttacaaggtatttcagaccgccccaaccattacggccgtgccaggtggtaactacataccccaccattgttgccgcatttgcgctgttcatccaagcagcagccatactgtttttggtattgttcatatttgcaatcagacagttgccgataggaagatatactctgcgttttccgctctctttcaaatcttttggtccgtcggggaaatccatgtaaagcacaccgtttttcggtttgatattacctaaagagaatggcatttccaaattgcgttctgttgcatgtgcagcagtgacaaccaagtccggattgtatttttcatacaaatcatagaaagtctgcattgcatctttcggatctaccatcatgcgctctacatctttataattaccgtgcgacatggtgtagcgcaatttcatctttttcatgggcagctggtaagaaacaatcgtatcgtctttagacgctttctcgccccacaatcccatcttgtggtcatccagccaaccgaaacgatcgaaccattttccactgctcaattctgtaatagtagctacagcatctttcaataccaaaggttcagtactgttgtttaccatcttcatggcagcagctgcatcgtaaccggtgataataccccaaaggaaatcggcatagatatcgccgtcaactttgcgactcatctggttgagggcaatgacataatcacgtccgagattttcaggtttttccacaatggcaacataacgcggacgaatctgctgcaactgaggcaacacctcttccggtttggtctggtaagtcaggaatgcagcctggtgcttatccttcaaagtctgtgcaactttgttccatgcagaatcagcaacgacactgtttcctgcaattacaacatactcattagccttcggtgccgactgacagcttgccaataaagcgcaaagaccaagtaataaattattcactttcatatcaagttatttggttaattaagattcctgagtatacatagtggccaactgctctttgattgactcactggtgatgtaatcgtcaaaatccatccgtttgtcaatcattccattaggagtaagctctatcacacggttgcagactgtctggataaactcatggtcgtgcgaattcatcaacacgatacccttgaaagaaaccaatgtattgttgaatgcctggatagattccaagtccaagtggttggcaggagaatcgagaatcagcacattggcattattcagcatcatgcgggcaatcatacaacgcattttttcacctccagacaatactttcacattcttgtaaatatcttctcccgagaaaagcattttacccagaaaaccacgcaggaatgtctcactggtatctgtagaatattgtcccaaccaatcaatcagtttcatatctgtatcgaagaaagccgagttgtccaaaggcaggtaagcggttgtaatcgttactccccaagtgaaatctccggtatccggtttttcattaccggtgatgatttcaagcagagcagtcatcgcacgtgggtcgcgggacaaaaatacgattttatcgtctttctctacagagaattccacatccttgaacagacattgaccgtcgatactcttgctcagattgcgcacctccaatatcttgttacccacttcgcgttccggagtaaagatgatacccggatatttgcgggtagaaggcataatttcctcgatatttaatttctccaacatcttcttacgactggtagtctgcttggattttgcaacgttggcactaaaacgagaaataaactcctgcaactctttacgcttctcttctgccttcttgttttttgcctgcatctgacgcagagccaactggctggattcgtaccagaaactataattaccggcaaacaactgaatcttgccatagtcgatatctacggagtgggtacataccgagtcgaggaagtgacggtcgtgagaaacaaccagcacggtattttcataatttgccaaataattctcaagccacatcacagtatccaagtcaaggtcgttggtcggctcgtccaatagcaagttgtcgggctttccaaacaatgcctgtgccaggagaacacgtaccttctgcttaccactgagatctttcatcagagaatagtgtaaatcttccttgatgcccaaaccgctcaacaagttggctgcatcgctctcagcattccagccatccattccggcaaactgctcttcgagttctgcagcacggataccgtcttcgtccgtgaagtcttccttcatgtagatggcatttttctcttgcatcacttcccacagtttcaggtggccttgtaatacagtgtcaagcactgtacactcatcgtatgcaaagtggtcctgtttcaataccgacaaacgctcacccggaccgaacatcacggtgccgcgagtcggttccaagtcaccactcaatattcttaaaaatgtagattttccggcaccattggcaccgattacaccgtagcaattccccggtgtaaacttcaagtttacatcttgaaacaaagtcctctttccaaattgaatctctaaatccgaaactgtaatcatgtcaataatttaattaaaatctttgcaaagatagctttttatttacatctttccgtacatcttctcgtaataacgctgatattcaccactagtcacctcatcgagccaagcttgattgtccaaataccatttaacggttttttctattccttcctcaaattgtaaagaaggcatccaacccagttcatttttcaattttgtggagtcgatagcatagcgcaaatcatgtccggcacggtcggcgacaaaagttatcaaatggtcggaagcgccctcctgacgcccaagcaggcgatcggtcactttgataagcacttttatcaggtcgatgtttttccactcgttgaaaccgccaatgttgtaggtgtctccaacttttccctggtggaaaatcaagtctatagcacgggcatggtcgtccacataaagccagtcacgtacattttcgccctttccatatacaggaagaggtttgttgtgacgaatgttatttataaataacggaatcagcttttccgggaattggaatgaaccgtaattattggaacaattggagattttgacaggcaaaccgtatgtatcatgataagcccttacaaaatggtccgatgacgccttggaagctgaatatggcgagtgagggtcgtattttgtctgctcggtaaacagttccgtacctggctgcaaggctccgtacacctcatcagtagatacatgataaaatactttatctgcgaaatcaccttcccaagccaacttggcagcctgcaacagagtcagcgttcccatcacattggtgcgagcaaatgaaaacggatctttaatagaacggtccacatggctctctgctgccaaatgaatcactccgtctacctgatattttgcaaacaaagcctgcactgcgggaaaatcacagatatccgctttctcaaacacgtaattaggacattgttctatctcttttaaattggcaagattgccggcataagtcaaagcatccagattgataatccgataatccggatatttcttcaccatcaatttaacaaggtgcgacccgataaagccggctccccctgtaatcagtatgtttttcatgtcaatagtctatcgtatggttattctaaattttccaacatacacttaagagaagatttccagtcgggcacctctactccaaaggtttgttttattttggtcttatcaagtactgaccaagccggacggggtgtacgcgaaggatactctgcagtagagaccggattcacacggcatgtcttgccactaaggttcacgatttctgtagcgaaatcaaaccaggaacagataccctcattactgaaatggtatatcccctcgtattccacccgttcgtcattttccataatcgttgcgatggctctcgctaaatctgcagcgtaagtaggcgatcccatctggtcgtttacaacattcaattccggtttttcgtccgccagacgaagaatcgtttttacgaaattatgtccaaatgaagaataaagccatgctgtacgaataataatatacagacaaccggatttcagtatttcctgctcgccagccaattttgttttaccataaacgctgacaggacaaggtttgtttttttcagtataaggtttatctgctgtaccatcaaacacataatcagtagaaatatgtatcaacagacaatcttctttggcagcagcttttgccaaattggcaacagccagcgtattgattttagccgcttgctccggctcctcttcagccctgtcaacggctgtataggctgcacaattgataatcgtgtcaatttcatgcaactgaataaacttttcaacggccgtgtaattggtgatatccaattcttctacgtctgtataaaaaacatcgtccaatatggaaaaaccgattttccgtatttcagagcctaactgaccattggcccctgtcactaatatatttgccataatctactattcttaaaagataaaactttcagataaaggctgacgcatgcagtctttttgggaaagtatcattttttcgcgcggaatccgccaatcaatacccaatgccggatcgtcaaactgaatgcccccttcataatctggcgcataataattatcacacttatattggaaaacagcttcaggactcaataccgcaaacccatgagcgaagcctttcggaataaataactgacgtttgttttcttccgaaagctctacagcaacatgtttaccaaaagtcggcgaatctttccgcaaatcaacagcaacgtccaatacacacccttttaccacacgcaccagcttggcctgcgtatacggcggcaattgatagtgcaacccccgcacaacaccataagatgatttggattcattatcttgaacaaagatcgttttacctagtgcggcatcaaagcgttgctgagaaaaactctcaaaaaaataccctctttcatctccgaaaactttcggctctaaaatcaccaccccttctatttctgtttgtattacttccattgctaaaatttaatatgttaatttcttagctttcaattttgcagtagtttcaataaatattgtccatactgatttttcttcatcggttctgccaattgagttaaagtagcagaatctatccagccttgacgataagcaatttcttccagacaggctattttcaatccctgccgcttctcaatcacttctacaaaagtcgatgcctcagccaaagaatcatgtgtaccagtatccaaccaggcaaacccgcgtcccaacgactggacttttaacgactgttcttctaaaaagcactggtttactgtcgttatttccaattcaccgcgagcagaaggttttatattctttgcaatatcaacaactttattcggataaaaataaagcccgacaacggcatagttggattttggattttcaggtttttcctctatgctcaatacattgccagccgcatcgaattccgcaacaccataacgttccggatcgttcacccaatatccgaatacagtggctttacgttcctccgcaaccgttcgcacagaatcctgcaacatttgtgtaaaactttgaccatagaaaatattatcacccaacaccagacaaacatcatcatcaccgatgaaatcccgaccgataatgaatgcctgagccaatccgtccgggcttggctgttccgcataagaaaattctacaccataattagaaccatctcctaacaaacgtcggaaagaaggtaaatcctgaggagtggaaataatcagaatttcccgtattccggccaacatcaacaccgacaacgggtagtatatcatcggcttatcataaataggcaacaattgtttggacactccttttgtaatcggatacaaccttgttccagaaccgcctgccaacactattcctttcattattaacaaatatctattctagttagccaattttcttttggcaattaaatttataatataaaaaatcaacgaaaacaacacaatgtcgcacaatatcaataattcgttcgaccaacttctcccccaatatcctaagaagataaacagcaagtttagagttaaaattgtaaacgtagctttcttgtgcacgccatcaaatatcgtcagcaatttatggtgcaaatgccgtttatccggagcaaaaggcgattttccgcgcatccaacgggaaataaaaaggcgcaaagtatccaacaccggaattgccaccacgctgaaagccactgcaggcactgctttcaactgaaactggttcaagctttcatccggcagtttacaaagctttattgccataaatcctaacagaaatcccaccatcaatgcaccggaatcccccataaacattttcgaacgcttaccaaaaaggttgataaaaaagaagggaacaatggctccgaaaaggatgcaacataacaaagcatactccacatagcctacaacataaaagaaactgccaaaagccaagcaatccatcaaagccactccagaacaaagaccgtcaataccgtcaatcaaatttatggcattaatcaaaccgatcaaacctataaatgtcaatgggataccaaaccaaggacttatcagctgcaacccaaacagaccatgcatttcgctgaaatagaaaccaccgccaaccaccaagacaagcactcccagtatctctcccttcaacttctttcgcggcgatatttgaatcaaatcatcgtatataccggtaacaaatatcaagaaaacacccaacaacatatactgaaattcacgagtttcatcaaaacgtgcaaaaagcataaaggaaatcagaaaagacaaccatacaatgatacctccaatattgggaatactgccaatatgtgaagaacgtttattgggttttaccacaaaattctttaaaatagccaatttaaaaattggaactctcagattccaaccgataaccaatgccagcatcattgctaacacaagtcgccaattgtccgatagtaagctaagtaccattataattcaagaaaataattatgttcatttcagcatttcccgcaaaagtacatacttttatggaactactgaaatttgaactttaaaaaagctataaaaactttgtaaaggatttcaaactttaattatcaacgatttagccactctttaaattcctttaaacgctcagtacttactatcgattctatattttcaggtggtatcggatgaagaattattttaattcggctattagaatagcgtatcatatcgcgaatggcactaaaattaatgatgaattttctatttatgcgaaaaaagatatgcgggtctagtcgttcttcaatccgtgcaaccgtctggtctaccacataccccataccatcgaaagtataaagcatcaaatatttaccatctgccataaaataagcgacctctgctaccggcacagatttaatccgtgcccccagttgaaccagaaaacgctcctgatagccaccttgactatttttagaggtctctatacccgtcccccaccattgttctactttttgaattgtatttttaatttcttcagtatcataaggctttaggatataagcaatcccttgatttttaaaagcctctaatgcatattcatcataagccgttacaaatacaactggagcttccacatctacctgacggaaaatatcgaaactctgcccatctcccagatgaatatcactgaatattaaatcaaccttattttcccgcagccactctatactctcactaacagtttccaagcatgtaattacctttatttcgggagctacatctcccaataccttacataactctaatgaagccagcggttcatcctctataattactgcagtcattatacacgattatatctttaaactttacaaagttatgcatatttagcaaacattcccgcttatcctcataaaaaaagcaagaccaaccaaatcattacgattcaattggtcttgcgccttcaattattatcaagctctatttaattcaattcaggattattggccgttgcttctttaggaaaacgaatcgtataccgcggatcatctttatgtagaacagctgtctgccgtactccttcttggtcggtatattctttaacaatttccgggcgtgtcgtacggcgtaaatcaaaccaacgatgtccctccaaagccaattcacgagcacgttcatcggctatttctgccaacaattgctcttgattcatgttatccacttcgacaacttttttcgaataataatcagtcgtcaaccttttttccatcaattgcttcaaataatttttagatacgtccaactgtccatccaaatgagcggctgcctctgctgctataagataaatttccccgctacggaatgtcatgcgtacattgtctccatatcccttcttgggccaatattgaccattattctcaatataataatcagtaaaacgacgatctcctgtcttattgtatttatccaccagatttgctatgatatataaactccctttcataaaataccgatcggtcacttcatccaatgtcataatagcctccttcgaatcatatctatagggagaaatataacccatagcattcatatcttccaattcgcacggcatcaaagattcagctgcattcaaagctgcctgccaatcaccgcgataaagatgtacccttgcttctaaagctttagctgcacgacgcgaaaaacggtaccgagtttccaatggttgctgttctaccttcatcaactcctctcctatatggatatccgacaatatttgactgtacacttcttcaactgtttgcggaatatatttctgctcgatatctattttcaaagacaaaggaatgcctctttctgtcgcagccgttgtacgattatatggagctgcataaaggttcaccaattgaaaatgtacataagcccgcatcaacaaagcttcagcctttagctgttctcgagaatcttctttagcgtcaatctctgccccatcaatgttttcaataatactattggcataaaagattgtattatacatcatcgtccacggataggatggtgtatactcacccggatttgcttcattccacaaagcaacactgatatagtctccataagcagaagaactctgtgcggaaggaaaagtctcatctgctcgggcacttaacagatttttaaaaggaggataagcatcatatcctctagtcatcaacgcgcggtattccgtcacagtttcgggaattacctgtccggcaggtttcacatccaaataatcacaggaagagaatgccagaagaattccaatatatatactaacagactttttaatcatctcttttattttttatcggtttcattactaaaatgtcaactcaagaccacatgaaaaagtcttggggaggggctgtgcataaatattgccataagtttccggatcaaaatatcctttataagaactaccgaacacaaacggatttcgtgcttcaaaactgattcttgcagctgaaacatgaagtttttttaaagcccgctcacccaaattatatcccaaacggatactgttcacccgtaaataactcatttctttataccagatatcataattctgaaaagctgtacgaccaaaatctgtgtcaaaccaagtataggcaagatacctgtcactattcatcatatctgttcccaacaatccctgatatttaccgttaggattttcaggagaccatacatctaacatccggttggagtaattttgtcccgcataccaatctgtcggcgaataaaacggctgttcctgtactgtctgcttcaagataaaactggttgatatcgtcaaatcaaaattcttataataaaaacgatttataaaaccaccggtaaatttaggttctgtggttccttcgtacgtaaataaatccctgaattcctcattacttaaagaagtcgttgctatcggaatatacgggtccaacggtgtgattttaaaataatcgaccattgataccgcttgtccgtctttcatatagagaggcataccggtttttgcatctacacctgctgtctttatagagaattttgcaccgacagaatacccttcgattgaaggcaaacgatcttcatcacgaaccagaattctatttaccttactcttgttgtgggcaatattaaaatccatcttccaacggaaatcgtgcgtacggatattcaccgtagacaaggcaaactcaaatcctttatttgtcaatttcgcccaattcattgtagtattatcaaatccattttcaccagcaatggcccgaatccctatcaaatcatcactaacacgatggtaagcatctacactaaaagtaattcggttttgaaatactcccatatctactcccacattccaattactggttttttcccaacgcagattctgatttggaggagaagtcacggttattgtctgttcattattatcaggcaaaatagacgttgtgccccaagagcccacaatataaggcgaagtatttttatctacatttccttgaataccataagaagcacgtaacttcaaattactcaaccaatcagcatcttctaaaaatgcctcttgactaacattccaagctccagatacagaccataaaggcaagtatttgtattttttcgcaacaccaaacaaattagaaccgtcatatctcaaactaccaaaaaaagtgtaacgctctgcataagtataagaagctgtcataaaatatgacagattgcgattattgtacaactccttcttgtactgctgcaaagaagaagaatttgctgaactatatccctcagggataatgacaggctgtgtagtcaatgctttcggatcgtagccaaatcccttggtactgatacgagtagtcttatcgccacgcatctccatcccagccattacatccaccgtatgcattccccctaaagtcttgttaaactctccctgtaatttccaatgatactgtgacatatctgtattctgattttgaataatagcaccctccggcaaaaagtaatctccattataaacaataccataacgatatttacgaacataatacgattcttcttctgctaacttctccattgatgaacgatcgaataatactccgagttgtgttgagaatctcaaaccatcaattggtctataatccaacgtcatcattggcttcagagaaagggttttcaaataataatctgtattttcacgttcctctatataattgaaatccaacaactgactgtctttaccttgaatatcggaatcataaacataatttccttccttatcccaaatttcaagataaggatttactgttcttgtataacgggacggattaataaaagcatctgcatctgtcaaatagctagtctgtttattataattcataaacaacgaaatgcccatatttactttctcatgcaaattgaaatcagttttcaaggtcatgttaaaacgctcaaatccggtaccgatagtcgtcccgctttctttataataacccgctgacgcataatagcgagcaaaatcagaaccaccggataagctcaaattatattgctgattgacagccgcttggtatatttctttaccccaatcagtatttatattacgcaaattgttaatttcattctgcgcatctgctgagattgcagcaaaaccaccctctctataagcatttaattgatcgtattttgccaaaattcttctcacaccaccttctgttccattttccattttatccaattctggacgagcagcaattcccaattcccaatcaaccttttctgaagaattcatcaaattcaatttactcaattttggacgggtagtcacaaaagcagaagcagatgcattcacacgcattttaccggaacgtccctttttggttgtaataacaatgacaccattggcagcccttgctccatagatagctgttgctgcagcatctttcaatattgtaatattttcaatatcagccggatttactcctgcaatggaagtattatacaaattgtctatattatccttatctccaaaatctgatggaatatcatttccttctaatatcattccatccaacacccacaatggatcggtactcccgcttaatgacactgtactacgaattctcattttagccggtgcacccggagcaccattggttggagtcaccatcatacctgccacttgtccttccagcatctgatctacagatgcaatgcctacagctttgatatcatcagcttttactgttgtaatggcagaagttactttccgtttatcaatctgctgataaccagtcacgacaacttcatccaactgtttattatcggttttcaagcggaaagtaaactctttacctttagagatatcagccttcaatgcctcataccccacaaaacttaccactacatattttaccgcagcaggcaacaccaattcaaaatatccatttatatctgtcacggttcctgccggagagtaatccttggactcaggagaatccggatcgataaaaacggtagccccaggtaaaggctgcccagttgcagcctccaacacctgaccactgattttctttgtatcttgtgcaaatgtaacaatcggcaaacacaagattatcaacaaaataatgtttttcatattttcaagtaatttagtctgtatggtttcttattggctatttcatattcaaagcttctttaattcttataatcaaatcctcataatgttgacgagttgccatatcaccattattacgatttttctcagccaaccgcaatacacgtaacaaagcccctctttttacagaaacagcttcagacaccctgttcatcgacgaaaaatgcagatttctcaattgcacggatgcatctacaggtagagagaatgtagccttctgcacagcataacaacatacatgtccatgatgaagagctttctttgtcgtcttttctactgctttattagaactaacaataattgcatcaacatagtttttctggctcatacgctcaaacaacgaaagatttcgtccctcaatcgaacctttaaaaacagctttaaacaaatcgtcaaacatctcttccggtgtatatgtattctctttaccaaccataacctctgcctcatacattcgtaacagacgatcatctttcattaaattatagaacaccgcatactgcaattctcgagctgtattgtaaggagaatactctattgctcctgcaggagaattacgcacaggataactttttttccaggcatcagcaccaaaaagccattccggaacaatgaacacttcatcaataagatatttcacagcatctttctgacgcgccttttccactggaatataacggtcaaaatcctcctctcctaccggattattaatatagaatcccccgacattggcagtcacatgccctgcatataagctccattgattaatcacagccatcaacaacttaccggcttccagataattcttcccatcctccttcgtccattctacgatattcggaacaattcgtttcaaattcatgataccataacgattagccagaatcacattatctccaagatcttcatcctgagctctaggatcaatagggtctttcggatcctgctgttcgccataccaatataatggatctccagaatgctcagttatccaattatttaatacaggcaactcttcatgaggatctttagcatccaaccaacggtatgcccaattaattgcatacttatcataaatgccgattactggagtaaaacgttccacatgatcttccggttgcgcaacataattaaaacgagcgtaatccatgatagaactggcagtaccacccattttagcagtaaatgtacgcgaacgtaaagaatctaccgggaacgaccaggaagcacccatgttatgctttaaaccaaatgtgtgtccaacttcatgcgaagaaacaaaccgaatagcacttgccatatattcatcatcaaaagtattcaaacgtgcccttggatcaacaggaccattttgtacacgaatccaggtgtgcaacaaagtcattacgttatgccaccacaccacatcagcttcgataatttcaccggaacgcggatctatcacagatggtcccattgcattagcctgctgagaggctgcatacgtaatcacagaataacgaacatcatcaatatcaaaatccggatcatcgacaggagcatccttagctattatggcattcttgaatcctgctgcttcaaaagcagcctgccagtcaaataccccagccttaatctgctctctccactgcttaggagttgccggatcaatataaaatacaatcggtttaaccggctctaccaattcccctctcttatatttctccacatcctccggttttggctccagacgccagcgatgcacaaactccctcgtttccacagcctgctgactatcattaaaataataatgcggtgttgaaaagaaaccaacccgatcatccgcaaaacgaggaaccatcggtttttcaggtaacaatacaatattagtagttgtttccactgtcaacggaacatctacaccactgtccataacttgagctgtcaagaaggccttcactactacattctgaggaaaagctttcatagcatctatccgagacaaatcctttttcagagaagcgctactcaatgatatactaccgaataaatcattaaaactcttttcgctaccatcaaaaaccttgttcactttaacaacaatagccgttgaatctgaattatatctttcaattggaaactgctctatcacagcctcccgataattatctttcacagaacgtgcaatagcgtcaccctccggtgcactaacctgcggattccatgttgtcacccatactttaccctgcgcttcatctttacgaaaacgtatcatcttatcttcgtaggacatacctttattaagtcctgcatcatttaattcatacggtactccagaaactttattaacaatcagcaaatcccgattaaaaacagaatcggggatctcaaaataccaatctttatcaatacggtggatacgcaacattccgtcacgagtctcagcattcttcacccaatcactataactgtccttgatggttaaagtcgtgtctgacttcatttttttccgtttcctaaagccccaagaagatgcttcagccgtctccccgaccaaagccaatacaaacaaagttgcaattaaatagtacttattcatttcgtgtcaatatttatgcatttcacaatattaacacacaccaacactattatcaaatgtcaaggcataaactcgcaaaaacgaggagcaaacctacaaaaacaaggagtgaataattattcatttacaacaaaggtagacgacatatatacaattcaccctccaccccacaagatatttgagcattttccgaataatagtcatatattttccggatactctcaatgcctactcccaacgagtccctcaaactacctgaacgtggacgatgagaatttgttacaatcaatacatctttttctatatagacatgaatatacaaaggtctttgccgagtgatttcattgtgtttaatggcattctccaccaccatctgtaatgccataaaaggaattttacgcttctccttttctacctcttcatccacttccaaaaacaactgttcttgaaaacgtatcttttgcaaaaaataataccgcttcataaaatccagttcctcttttaccgtcaccagactttcatctcttttatccaacgaataacgatatatacgcgacaaattaagcacaaattccttagccaatctagcatccgtccctattaatgcactcaaagaattaaatgaattgaataaaaaatgaggattaattctatttttcaactgttgcaaagacagttcagcagtctcttcctccaaatgtcgacgacggacatattctttacgccattgatattgtgaatatcctaacaaaagacaaaataataccagaaccaatatggttgccaatactatatatctgtgaaaatcgctcatttcttcttcaacaaaaaaatcagggatattaacaacaattatccaaatatcacctcccactttgactggataatataccctctgaacttccacatgcaaataatcagaaactccatctcttctaaccattcgctgtgtacgcaacacttcattaaaagccttgccgtcctctttattggcccaatgacaaccaatacgagtttcatcaggatgagccaatactattccatctttgttcagcacataagcataacttcgcacactgggagacatatctgcaaaataccgatgaacatcaatcaatgagatatccaatccataaaccacactatccgttttacgataaagcgtccaataaagctctccatcatcataaaacaaggtgccattactttgcttttctgcgcaatctgctatttttttaagagtagaataaagcgtcgtatctttctgaaccactccggaagagtcacaacaaaccatagcattattatgccatttataccatatccgtgacactttcctgtctaaatgccacaatcccttgactaattcttgaagtccaagctcattgtctggattgttttctatataattatgaatactttctcctaactcgactgttttttgaaaatctaatgccaataaatccgccctataatgtcccacttcatccaccaacgaactatgcattttgtttgcagtatgacttattgctctcccaaccacccacatggccgccataaaaaccaaaagcaatataacgcctatactgataacacttttatttcgcttcattattatgcttttcctgtttaagcacctcattaaaacaatgtcggcaaatgggctcataatcatgaacttcccctaacattaccaatttgtcattttctgttagtcgatgagaatgattggcaatattaccacatcttacgcagatagcgtgaacttttgtcacatactctgccacagccatcaaatttggcattggtccaaaaggttttcccaaataatccatatctagacctgcaacaatcacacgaacgccattatctgccaatgtcttacacactgatactatgttgggatcaaaaaactgcgcttcatcaatacccaccacatcaacgtcccccgccaataaaagaatattacaagaattctccacgggagtacaccgaatcgcatgcgaatcatgagatactacatcttcttcagaataacgcacatcgatagcaggcttaaaaatttccactttttgtttggcaaactgtgcacgtttcaaacgacggattaactcctccgttttccccgaaaacattgaaccacaaacaacttctatccacccgtttcgttttgcattttctaaaaacatgtctcttgatctttttaaccgtacaaaggtacaaattattccatcaaacgggaaagaaatttaccaacagccctctgcaactgagatactgtgcaagtgtaatgattaatcaatattgtaaaagccaaacgttctcccttgttattagttagatacccggataaactgcgtacaccagacatcgaaccggtctttgcctgcaattttttattcaattgcggatatgcatgacaataaccggacaagcctccatccacacctcctaaaggaagggaatttaaaaaggccgaatgttctcttttaccaatatagaccaacaaatctgtcaacaccctagccggcagtgcatctaacggagatagaccacaggcatcatacagagttattccttgtgtattgattccagccttaaccaacaaagctgatacttctttctgccattcttttcctccagccaatttccccattgcttctgcaaaaagatttacactggctttattcgtatgaaaaacaatctcttccaaacgaggagaatcaaaataaaccaattgggttcgtgtcgtatctgcaaagacattgctttccacacgaattcctttgtcgctaagctctgctttcaattcattgatacaagccatagcagggtcgtgcaaagcggccttgaccttaaaggatttacgatttgccggcaaagttccttttacacaaatcaccgtactataaggtcctccatacacccaagcattatcccgattagccgcagcagccttcacttcattctgaatttctattccagggagagcaggatatacagagattaatttcgccacggaaccaacaactcctgtctgaaagctaaaaacacaagtattatctctatagttaaaaggcagatagatagctccataataattagaaatatcttcccagacccaagaacccggaatatcagttcctttttcagctccttccaccaataatcggccaccaatgtgttgaataccggcacgctggattgcagcaaccaaattttttacaaacgaacgatgagggaaaaaacgagaatctaatgttggatctccggcagcggaaacaataatatcccctgacaatacaccatcttttatctcccctgtataaaatatattggtacgataacggtaattaactcctttttcctgcaaggcaaaccacgtcggtaaaatcttggctacagaagccggagtcagagccatctcagcattacaagccactatttctttgccgtcattcacacgcttgacagacacacttacagcagcattctttactccatctgtattcaacaactcctccaaagcagccgattgcccatatccccataccactgtcaataacaaactaaccagcaatattcctttcttcattttgttattgattgtctattgttttcaaaatcttttccacctcttcctctgtatcgtgcaattttgatttacaaaaaactatcaattctgaaactcgttttacattagcactcaattcatcaacatccaactgattgtcttccaacttagcaacaatctcttccatttcgaccatagcctctttatatgtcaatttattttcttcgcacatattttatttcatttaatcattcccaattacaacactctttacatagcctcccgacaattgagattccaaacaatcaccggaagaaatttctgcaatatcttttatcgccttgccgtttacacgggtaattgaataccctcttttcaacacattagagggatccacatatttcactgtagttgccgccaaatccaaacgccgtctatgctctgccaaagttgttattatgcatcgttgcatatcacgttccagcccatccaattgatttctttcctttgtaaaacctaaagccaaccgactttccagccgggaagatgcttgcaccaaattatgagattgctgagcaataaaagccgacgaagcataacttatctgttgtaaaagcatgcgcaaactggatttcttatcagccagcaacgaagaaaccgaacgtttaaaatcagatgtcagtttcaactgcctggtcgtttcctcatgcaataaatcctgtactccatttacaaaatctgattgcaaccccatcaaattttcctcctgttcacgaaaggcatctatcaaaaatacagctgctgctgtaggagtcttcactcttaaatgcgccacccgatctacaatcgtttcatctcgctcatgaccgataccggcaatgaccggcaatggaaactgagcaatattggcagccatatcataagtatcaaaactacccaaatctgtttgtgaaccacctccccgaatcaacactacaacatcaaaaaacgattcatattcatagattttatccaaagctgcaatcaccgactctgtcgtcttatccccttgcattacggcaggaaaaagatgcacatgaaaccggtaatgatacgagttattcagtaactggttcataaaatctcccaatccggcagctgtaggtgacgatatgacagcaacattcttaggcaatagtggaaaaggtaattcacgattcatgttaataatcccttctgcctccagctgcttcaaaatctcctgctttttacgttccaaatcaccgattgtatacgttggatcaacatcgcgaacattcaaagaatacccatacaactcatgaaacaccacctcaaccaacaacatcaccttcattcccttacccaaagcacgaccagtcgttgtctcaaaataaggctgtagagtacggaatgtaaaggcccagattgtagcacgggcagtagcgataatactgtcatcctcttcccgtttgtctgccaattgcaaatagcaatgtccggagcgattcaactgaatttcggtaatttcagccgttatccatactgcctctggaaatccacgcttcaaaaatccttttattcgggcattcaattcatatagagtcacagcttgcattctatctcctcattttattgttccaacttcaccgtatgattcaattcatcgatataatccagcaactcctctctacccaaacgtttttctgccgacgtcatgaaagcaagcggagtagactcccaagtatccaacatcgcccgatgataattgtctatgcaattcaatcgctgtgtagttgtcaacttatcagcttttgtaaaaaccatcacaaaaggcacaccattttcccctaaccactccataaactcaaggtctatcttttgcggctcgtggcggctatccaccaatacaaacaaacaaataagattctcccgcttaagtatataatcacaaatcatcttttcaaattgtctccgtaatccctccgaagtgcgggcatatccataccccggcaaatcaaccatataccaggagtcatttatcaaaaaatgattaatcaactgcgtttttcccggacgggcagcggtctttgccaacttcttattattagtcagcatattaatcaacgatgatttgcctacattcgaacgtccgataaaagcatattcatgacgattcggggccggacatttagccaccgttgaattactcattacaaattcagcttttactatatccataatcgtctattaaaaaaataaaaattcatctctattccattccatctgtcaggctacggggaatatctttcccggcttttttagatttgacacccaattcgtgcaacttttttgcctgcgaaacaatattaccactaccagtcttaagacgtccaagagcctgatcatataccgtttgtgtcttggaaatacaatcaccgattgtctgaaaactttcaaaaaatgcaatacacttatcatacaaccgtgctcctctttctgctatttcctgagcatttcgattttgatattcgcgagcccacaaatcagctgtcagtttcaaagacactatcaaattagcaggacttaacagcaacactcgtttctgataagcatcgctccacaaggcggaatcgtgttgcattgctaaaacataagatgcttcgttagggacaaacatcatcacaaaatcaagcgtattatccgcccaattatcataacctttagtagccaactcatcaatatgcttacggacagaatgtatatgctcttttaaagccacttcccgttccgcatccgtttccgcattgcaataattcacataagcagtcaacgacaccttcgaatctataatcacccgacgattgtcaggatacaacaccatgacatccggacgcatagccttgccactgtcattataaacgacacgattgtcctgatctttcaatgtctcttgaataaaatattcacgaccttttgtcaaaccggaattttccaaaatacgttccagaatcatctccccccaatctccctgagctttggaatttcctttcaaagcactcgtcaaattcgcagcatcaatacgaatctgattattcaactgcaccaattcagcaatttttctctccaataaggtgcgttcagtagcctctttatgataagtttcatcaactttctttttaaactcttcgatatccttattcaaaggctgtagtatcttttcaatattctctcgattggtttccgtaaaacggcgggatttatcctctaaaatcgttcccgccatattacggaattgttctgtcatcaactgactgatctcgcccatctccttcttttgatttgcgagtttatcctctgtctggcgtaaacactctttcagacgttccgtttcagaaaccaaacgcactttttcctcttgcagttgttcccctttagtgcgcaatcgctgaacatcagcgtccatcataaataatcgggtctcgatggcttttttactgctatgtactatcagaaacgccaccaccccacccaacaacattccacctaaaaaaatgacaatccccataatacacctatttttcccctctattaatactctaccttttccattgacgcattccacatacggaactcctcaccgccttcttgctcttccactttcaaaaaagggatagaacgctctgcttccggcatggcaatttctttataaataaacgaatcatcgaatcctgcttgcgcagcatcttctttcgtcgacgcataatacacctttgcaggacgcgcccaatagatagcccctaaacacatagggcatggctcacaactggcataaacctcacatccttccaactgatatgtattcaacttacgacacgcctcccgaatagcattcacctccgcatgagctgtcggatcgttgctcggagtcaccgaatttccacaagccgcaatcacttcaccatccttcacaataacagcaccgaaagggccacccgttccatttttcacattttcctcagctaaacgaatagcctcctccataaacttcttctcgtacatacctatttctttttaacatcttttggagtctttgtttcggtatctatcaatttaccgctataccacaacataaatactcctgcaacaacaaacggaatactcaaaatctgtcccatatccaacaccataccggcttcccagggctcttgaacctcctttacaaattcaataataaaccgggctgtaaatatcagtatcagaaacgaaccgaaaataaaacccatccgttttttcaaatccgtacgccaataaatatgcattaaaataaagaaactgatcaaatagcaaactgcctcatacaactgagccggatgacgcggcaattcaggattttccataccagaattaacgaaacagaatccccaaggtttttcagttacaacacccacaatctcagaattcatcaaattacccatacgaataaaaaaacctgccagcgcaattggaatcacagccctgtccaaaatccagaaaatcgactttttgcttaccttcttagaataataccacaaaccggcaataataccgatagcagcaccatgacttgccaatccctgataaccggtaaacttaaactccggagcaaaacgcaccggtagaatcatctccaacggatgggcactataataagcccaatcataaaaaatacaatgtcccaaacgggcaccgataatcgttgcaatagccacatatatccacagcttatccagccaaggcattggtaacccctctgacttaaacatcttttcctcaaccttgtatccgaaaataaaagctaaggcaaacaacaacccgtaataacggatagaaataccccccagattaaaaatctcgggggtaacatcccagtttatgaataatgataacattcttattcgtttttaccgtgacaatttttatatttcaaaccactgccgcaaggacatggatcatttcgtcccactttcggtcccactttcaccggttcatgatgcggctgttcccgtttaggagcttcagccggtgtttcattcctggtttcatgcatcttgctcaaatccgtgcgacgctgttcagcctctctgacttcctccggttccggcattggaatctgtcccttcatcaaggtagaaaccatccctttattgattttctccaccatcgacttgaacaaattataagattcgaatttataaatcaacagcggatctttctgctcataagcggcattctgtaccgactgcttcaaatcatccatttcacgcaagtgctctttccaggcatcatcaatatgtgccaaaatcacagccttttcatacgaacgcatcaaatcctcgccctgagaatgataagctttctccagatttgtcaccacattaaacaatctcacaccatcggtaaaaggaacaacaatgttcttatacatatctcctctggtctcaaacacattctttatcaccggataagcctgctgagcaatcgcttccaccttccgttggtaagcctctcgtacatatttatacaattgctccgtcaactcttccggacgcactttcttaaattcatcctctgaaatattgaaatccaccgacaacacacgcaagatttcaagacggaagccttccacatcatttaccggctgatattcctgcacgatagaatcacagacatcgtaagtattattagccacagccacaccaatacgttcgcccaacaaagcctgacggcgctgtttataaattaccgtacgctgggaattcatcacatcatcatactccaacagacgcttacggataccgaagttattctcttccaccttcttctgtgcacgctcgatagacttcgtaatcatcgaatgctgaatcacatcgccctcctcatgtcccagacggtccatcacacggataatacgctcggaactgaacagacgcatcaaatcatcctccaaagacacgaaaaactgagaagaacccgggtcaccctgacgtcctgcacgacctcgcaactgacggtcaacgcgtcgggaatcgtgacgttctgtaccaataatcgccaaacctcctgcagctttcacctccggactcaatttgatatcggtaccacgacctgccatattcgtagcaatagtcacagtcttcgactgaccggcttctgcgacaatctcagcctctttctgatgcaacttcgcattcaatacattatgcttgatacctcggagtttcaacatacggctcaacaactcggacacctcaaccgaagtcgtacccaccaacaccggacgtcccagttccaccaaccgcacaatctcctcaatcacagcattatatttctcacgcttcgtcttataaacaaaatcatttgcgtcaatacgcgctatcggacgattcgtcgggataacaactacatccaatttataaatatcccagaactctcccgcctctgtctctgccgtaccggtcatacccgccaatttatgatacatacggaaataattctgcaaggtaatcgtagcaaaagtctgagttgcagcctcaactttcacaccctccttcgcctcaatagcctggtgcaacccgtcagaataacgacgtccctccataatacggccggtctgttcgtccacaatcttaaccttgttgtccaacaccacatattcaacatccttctcaaacaacgtatatgccttcaacaactgattcaccgtgtgtacacgttccgatttgattgcataattctgtatcatctcatctttcttggcaagcttttccttctcatcctgagatgtcttttcaatttcggcaatctccgtaccgatatcaggcaaaataaagaacttcggatcctcaccggcagcagtaatcgtatcatgtcccttatccgtcaaatcgatagaattcaatttctcatcaatcacaaaataaagaggatcggtaatctccggcattctccggttattctcctgcatatactcgttttcagtcttaatcagtatagccttattaccctcttcactcaagaatttaatcaacggtttatatttcggcaaacctttatgggctctcaacaacaacacaccgccttctttccgtttcttcggatcatcactggcgagcaactctttggcatcgttgaaaatcttcatcacaagctcgcgctgcattttcaccaaccgatccacacgaggcttatattcatcaaacatctggtcgtcacctttaggcaccggaccggatataatcaaaggagtacgggcatcatcaatcaacacggagtcaacctcatcgacaatggcaaaattgtgtttgcgctgcaccagatcctccggattgatagccatattatcacgcaaatagtcgaaaccgaattcattgttcgtaccgaatgtgatatctgccatataagccttgcgacgctgcggagaattaggctggtgtttatcgatacaatcaacagacagaccgtggaacatatacaacggacccatccattctgagtcacgctttgccaaataatcattcaccgtcaccatgtgcacacctctaccactcaatgcattcaggaacaccggcaatgtagccaccaaagttttaccttcaccggttgccatttccgcaatcttaccttgatgcagcacagctccaccaatcaactgcacgtcatagtgaaccatatcccaagtcacctcattacctccggcaacccaactattgaaatatatagccttatcaccttcaatctccacaaaatcatgctctacagccaaatcacggtcgaactgcgtagcagtcacctcaatctcctgattttccttaaaacgacgagccgtatccttcatgacagcaaaagccttgggcatcaactttgtcaacacctcttccactttcttgtcaatttcctcttccaacttgtccacccggctataaatctcctctctcacttcgatagatggtttttcttcttccaccttacgtttcagagcttcgatttcctcctcttcagactgaatataggcatgcacctcttttttcatatcttcagccacagcacgcaactcatcgtggctcaactgcttcatcttttcccactctgcattcacttgcgccacaatcggtcgcaactccttcatatccctgtcggccttattaccgaacagtttttttaaaatatcattaaatcccatgtaaattttgattttaaattttaattgaaaactactgcatactaccttctatactcattttcaattattcccggagcacgaattttatgtgtcacatggcataaattgccaatttccactccggccgtatacgcacaagatatcgggaaacattcaccaccggcaacctgccccatagacgaatcactctcttcttcactctcctccaaataaacagccacaaccttcagtgtattcgttattacgggtctgcacctatccgcctttaaaatcccaatactctcctgggctttcaaaggtatagtcacagcacaacctgccatgacatacaaagctgctaatagataccgattcatttccacgattgacaaatatacaataaaatgtatgaatttctctacttacccctctattttttagagccaaatgccaaatctcctgcatcccccaatcccgggtcaatataatacttttcagtcaagccgtcatctaaagctgccggccacaaagtaagaggctcaccggccaactgtttttccacatactccacaccctgtctgcttgcaatcacagacaccatgtgcgtatgagccggacaacttccctgtttcaacaactcacgataagtgataaccaaagacgaaccggtagccaacatcgggtcaaccaacaaaagctgctttcccgtcaaatcaggcgtataaatcgaatcaaaacgaatctctatctgctcgttcacgcggctgtatgcccgtctggctgatataaaagcatttcctgcacggtcaaaataattcaaaaaaccttgatggaatggcagcccggcacgcaggacagttgcaatcaccacctcgtcatccggcaacatcacaacagccggattaatcggagtttccactgtacgctcagaataagcaaaagtcttgctgacttcataagccattatctccccaacacgctccaaattgcgacggaaacgcaatggatcctgctgtatattcttatcacggatttccgacaggaaattattcaatacagaattctgttcattaattactcgaatcatcttaaaatcttttttttacactgcaaagaaaataaaaaatccccacctaaaaaaaagaggccgaccgattttttcggccaacctcttattcgctaaactaaaactaaattttaacacccttgtagtctctacaatggcagtgcccgaacatcagcatgactgcctatgtcaatcactgccataaaattaaaaatattattttataaggcaacactatcgaatgttaattttttccgttttagactattttaatacttagatatattttcacctccctgataattttccagataccctatcacttcctccacactattcgccacaaaatagagtttatcgtataccgatgcaacaaaacctttatctcggatactcgaaataaaatccagcaaaccatcataaaaacctgccgtattcaaaaataccaccggcttattatgctgtcccaattgcttcagggttatcacctccgtaatctcctccaaagtcccccatccacccggtagcgcaacaaaagcatccgcataagtcctcaatagaaattttcgttccttcatatccggagccaccaccaactcgtccaacccctcggcagcaacaccgcgcgacttgatacattcaggaatcaccccgacagctttgccaccgctattcatagttgcggtggcaacttggtgcattaaacccacacaagtgccaccgtatactaacttccaacctctgtttccaatctcctctcccaattttcgtgcatcatcaaaataaatgcttccgactccattagccgaagcacagaacacggctacattcataaccattaagcgtcaatggttgcatatgtcgcattctgctcaataaactggcggcgtggcggaacatcgtcccccatcaacatagagaaaatacggtcagcttccgcagcattttctatagacacctgacgcagaatgcgattttccggagacatagtcgtttcccacaactgctccttactcatctcacccaaacctttgtaacgctggatatgcaaacctgcatctcccttgccgttgctcatctcattaaccaactgctcaagttctttctctgtccagcaatatctctgctccttatttcctttcttcacagaatacaaaggcggagtggcaatatacaaatatccgttttcaatcaccggacgcataaaacggaagaacagcgtcataatcaacgtggcaatgtgcgcaccgtcgacgtcggcatcggccataatcacaatcttgtgataacgcaatttctccagatttacagcctttgtatcttcttgagtaccgatagtgattcccaacgcctggaaaatcattttaatctcctcgctttcaaaaacgcggtgcaacatcgccttctccacattcaggattttacctctcaaaggcaaaatcgcctggaatcgacgatcacgtccctgctttgcagtaccgcctgccgagtctccctcgacaaggaaaatctcacattttgtcggatcattatccgaacagtctgccaattttcccggcaatcccgatccgcttaaaacagtctttctctgcaccaattcgcgagccttacgggcggcatgacgtgctgtggcagcaagaatcaccttatcgacaatcgctttagcatctttcggatgctcttccagataattttccaaaacagtagacacagcttgagccacagccgtacccacatccgtatttcctaatttggtcttggtctgtccctcaaactgaggttcagccaccttaacagaaatcacagcagtcaatccttcgcggaagtcgtcactattgatatcaaacttcaactttgaaagcataccatgactttcagcataagccttcaacgtcgaagtcaacgcacgtttaaaaccggccaagtgcgtaccgccttctatcgtattgatattatttacataagaaaaaacattctcagaaaatccggtattgtaatgcaatgccacttcgataggcaccccatttttctccgtcgaaatatcaatggtattgtcaatcaggcattcacgggtattatccaagaactcaacaaactcgctcaatccgtgttccgaataaaaagactcatgtttcggttcgttcgtttccggactaacatcccttttatctgtaatagacaatcggattcctttattcaaatatgccaactcgcgcagacgagccgaaaggatgtcatatttatattcagtcacataaaaaatcgtatcatccggcaggaaagtcaccttcgtaccggtgcgctctgtttcacctacaatttcaacatcgccggcaggcacacctttgtgatactcttgtctccagatttttccatccctgcaaatttcagccaccaacgtgctcgacaaggcattcacacaagagacaccgacaccatgcaacccacctgacactttgtatgaatctttatcaaacttaccgccggcgtgcagcacagtcatcaccacctccaatgcggatttattttccttagagtggcgtgcggtcggaataccacgtccgttatcttctactgtaatagaattgttctcgttaatcgtcacgcggatatcattacaaaaacccgccaacgcctcgtctatcgagttatcaacaacttcatacaccagatgatgcaatcctttcacgtttacgtctccgatatacatagaaggacgcatgcgcacagcttccagaccctcaagcacctgaatactgtcggcagaatattctctttctgatttctctaactcttcgctcatattttaatttaattgctatttccacttaaacatgcaaatatagcaatttttttcaaaagaaacagtatcttctacctctgataaaattttatatctttgccaagaaaaacggtttcgtcggaattccctgctttgtcctcgaagacgggacaatcacgctctcacccgaagaagcaggactccattcccgaccatccaccgaaggcgtctcctgcaatattgacggaagcggttgctgaataatctccaaacatcttccgatagcggacattgcctaattcctgtatttgagcgcaaacaaaatctacaaaagataaatcactagccataatattcactatttctctttaatctgtgcaaatttaactaaaagcagactctgtgcaaacaaagtaaatccactgcaaataattatcagtaataaaaatatgtgtttcatggtatgtatgttttatgattatttgctccttatatatacatattcaagagagtgtcattgacactctcttgttaaattaaccatctatttctctctaatctaacacattaggcaaacaggcaaatgcagttgcatctatctcaacccaattagataccaaatctatggtcttcatttccggtaatggattatcgtcatttatatatctcaattttgctaaaatatacctgactttttcaactgttaccaatattttttttctatatggaagtacacctatgccatctggctgtacaaatataggaagacttacggatattctttctctaggcttcaacaatatcacttttttatcaccaaaatcaaaagatggaatcgaatatccttgagcaagatgcgttcgatattgtgtctcttgcaccaaataagtgtgaatagcgcaaccaatattttgtgctcctctcataataaaaaaagaagaatccgtattgttgataagtgtaaaagaaaaataagagtctgcatcaaccttaccggaaggattcaccaattcaaatttaactgaaaacggactttttgcaaacaaagtaaatccgctacaaataattattaaggatagaaatatgtgcttcatagtatatgtgattttacaattatttttcattattaatatatttgtattttctgcgataatcttctaaatttttctccattaattttctgaaagattcagacatttgattcccatatctcttcaactggactttataagcttcaatttcacacttatagtattttaaatttgctttgataatatgagtttcaccattcttaacatcttcttctgtaggtttgacaatagtttcataataactattccatcttattttttcctttgaattacatttttccaattctcgtggaattttttttatgtctaataaattatagaaagcatcccaacattcagctatgtcatgatcatcgtaaggcacttgatattctttcattacaatatagcctttactatctctttcaatttgaatatgatccaccatatcttgtttcgcatgaaccatttcatggtaaataattgaggtaaggtcagcttctgtatacctccgttctaacatgggaggatttatattcaaggtttttgtttccggattataactggcatttgttgtcggatttgccaccaattcaaaagtgattttaatcttacctgtattgacgcccagttctctaaaaactttctctataaattcaggagtaaatatctttttaagaaaattttcaagagttattttatcctgcttgggatgattgtcatctgtcactcctcctgacacattcccagatccgcctccggcttcaatgactccagaacctttatttcccgaatcggtcgggaaaactatttccggtggaagaatcactgtatttcctgaacctcccgtaccgacaacaacaacctcgggaataacataaccgtccgtattattaccggtaataccatcattccctccattattgccactaccactgccactaatattgccacctccaccaccactaccgccactgccaccccaataaccttcactcccatagcgtgattgtgtcgcacgagccaccgtataggaagccggcattgtttcataattgaataccgcatcggattcttcatcctgatgcccgtcagacaaattcttgatatgtccggtcactttccctgattcatatctccatccattaacaaattgcccattcaaatcatgaaaaagaacataaccgtccaaatggggctcccgatgcaaataagtattcaaatgaatatcggcttcatgattctcaatataccatacagacggcagaattgtcattacatatccgctttttctaagactgcccttatccgtcataaccacaagtcgtgaatatgaacggcgatatttgtattctccggatttcttgaacttggataagtttgtcaggggaacaaaatccaatccaatccggtcagtcaaatccacatcgacaaccaccaattcttcattactcgaagtacaggtatactcccagctaggctctgtataaaacagttgccctccatctgctttggattgtggtttaagcaacacaggctctccgtttttttgtaagttataccatgcgatagcttgctccaacggggttcctcccgcaaccaaaccgctatcgtccatttccaatatgtcctgacacccgaagaatgttaagggcactgcaagtatcatggacatcagaatccaaaaatacttctttttctttgtttttctcatttctgtaacatttaaaattaacaatttgttttatctcctctttcatataataaatttccggagtgttcactttaggtttcttggtcaatactattttggcttgttgatatccaagttgtttttttccttgaaggaaatatgattttgcgagtaaataatgaggtttgataagtgccggcaccatttttgaagcctctatccatttttcatcagcttcacgataacgcccttgactgtgaagggcaattcccaagtctatccgttgtctggaagatgggaaacatcgtccttgctgttccaaaacaagttctgcatgcctgtattccttcaattgattaagaatctgtccgtaataagacagatattcgttcgttgtaaaaagccggggatataattcctgaagtccggcaaccgtttgtctgtcggttacatcacgtagaataattttatcaagttttttacaactgtccatatatgtaaaaaccgaaatgccgacaggaatataaacaacgacagctaatacacacaaggcggttgttgtctttctgtttattttgatcacaacggcatgttgagtatccgcaagtcccgccaactgagccaccgtaataacaaacactgtctgaaaaagtatgctctcggtcggatatgaaaacataccgaacataagcatcgcacataaaagagcctttaaagagactatttcatgtctgaatcccacattttttattttaagaacacttgcaagcaatcctataaacaacacgccaccgacaatcccttgctctaccaatatttttaataactcgttaaaggcaagattcgtatccgaagccagattattaaaagaatcgcacgaagttgtcgtaagatattgcgcttgataattcatgtaattttgtctgaatgcacctgttccaagcccaagtatcgggctgtcttttaccatttctacagaagataaccaaacaagtatcctgccattggcagattccggtttcaaacaataaagataacaacctgccaaaacgagtatcaatatcgcagcaagcaagattttcaatttcggttgaaacagttggcagaataccataattacaccacaccccgaagccattaatgctgctctggagttcagccgaagtacaatgtatatcaggattgccaagactataatatataagattaatttcaaatgccataaattattttgcctgaaattattgtaaaacaaattcacaagagagattatggcaagtgagataaagccggcaagcaatcccggattaaagaaagtcccatgaatatgccggatggaactgaaattatttgtctggcacataagcccaaacaaaatttgacttagtgagataaaaacaatcatccattgaaatatcattgtattccttccatcaagggtatttcgggagtgaatatacaatatcaatatggtgagatacatataggtattgactgtatcactcgacatattgggaagccgcatgatattgaatccttgatatagcataaatgacaaaacaaaaacatccacagtcgttatttttacaacgttttggtacatggtgatttttatcatggatatgacagacagaaccaataccagcatatatgacatacacaatacttgtgcccgagaaacaaattcgacagccgacaagacaaacggcgcaacggttagtataattccgtatattatgataatggtttgtgttatagattttaccatattcctaatgaattatattgttgtgagtatcatcaccaaaaccttaccgctccgtttttccaagtgaaaattctttcttcaacaccggtggacagatttcgtaaccataacaaggcattgccaggaacattcaaatattcaaggaaagggtctgctgctacctgttgtcccaaagagcgccatccgtttttatcaaaataaaataattcatatctgtttcccggatatattccattaccatcatttctgggtaaaagcattacttttgaaatatgtacaggtttatcgaagtccacctcaatatagttatatatttcaaaataagtcaatggattaccatcggaaagattctcataatctgtacatccggacagagtgttgaccctaccttttactatttttctcttgttaaaaaaaatcaattctgcaatgttattgtaaccggaaacaacatatttccaataccggtatttagaagaatctacaagattcactatttcatattccatattgggattgcgttctattctatgcacgacaacactatctttatattctttattgtttgcacacaccaaatagccacctacaagatattccccatgtcgtgcattatactcttttgtcggatactttctcttcaagcataccctgtttaaattgtttttatctggaatcaaataatgaacattaccgtcatctccaagaataaaaggatacgtcaagggatagctgcttccatttttataggatacaggcaagtatacgactcctctacccatatttttaaacttgacccgacgaccattcgttttaccccatgcaacaggttcccatgacaaattgtgaaaaacagacaaaaatgcatattctgtatttgatttataattgagaaactccacatctacatcagaagttatgacatactgacctgttacatctttgttaaaagggtctttgaataaataagaaacatttcttacttcctccggcacttcgttgattgaaaatgttctcctgtatattttaggtgttttttgatatacttgaggcacaccgccatccctatagtaaggatcaatgattcttaaccaatgatgtgccccacctgtaccactccaacaaggcacaaaatctattgcacaaggaatcccaagagcccgatatttgaatagtttaatcagactggcatcgacacaatccaacacgtaagggtttatggtagaatcctgatatttcattatgcctgtttccggaaaccgaaacataaaatccccgatattttttatcgagtattttaaatcatcataacagttcattatatcatacaacatttcatgcgacaatgggagagagtccatccaattatccgccacttcttcttccgctctatatggcagtaaatactcacaaaagtcttcaaaagtcaatgattcaagccaaggtcgagactgccagatttcaaatgccctgtctatatgatgtatcagataatccgcccttatattagttatatcttcacgaacaataagtttctctcgaacatctggaatacgaagaggtaccattttcattacttttttttcaaaatactgtcgattagcatttgccgattccacattcaagttgtttttcataatctcttgtcctcccaatgttatatgtcccggcatattttctaccagaaagacggcagctttcaatttcaacgaatcttgcggattgacagaatagtgatgaaagagtttttcaagttcgactttgttctctttgctcttatgtagcgcatcttttaatttagaggaagtaaaattgcacgagacaatcaaaaacatcatcaaagccacaagcaagtctcggattgaatctgttaccataatcaaatcatatttcttcattttaaaacgtatagctccaagtcacacacggcacaaaaaggcagatagacacccgcttgacatccgtactgaaatcatggtaataatagctggggttctttcgcccgtaaatgttgtacacgccgaatgtccaggaatcaccctttgcctttttgttcttcaagtggaaagcgacatccaaatgatggtaggcaggaaactgcacattgttcggatgcggaacatactcccaacctgccggccagttgaaggctggcggatttcccgaacggtaatggtaggttgtcggaagaccgggcagcggtgctgaaggataatactgacgaccgatggtggtataattgccgctgctgtaggtgaaattgactccaagcatcttccggaaacgccgttcggcaacatcccggaacgtataggtcattgccagattcaccttgtgcctccggtcgtattcaaaggggaaccattccccctgctttatcttgtcaaagctgcgctccgaacgcgaccaagcgtaagaaatccagccgttcaaggctccggtcgtcttgttcaacatcacctccacgccatagcccctgcctttacccgtattgatatagtcctgccagctctttcccgcctcacgggcatacgtcataccttcctgatagcggattaccttccgcaagtcgttataatatccttccacagaaaactccaggtccggacgcaactggcggtaatatcccaatgaataaagatccgaacgtcccggctccacccggtctgtaacaggcacccacaactccgagggcgcacccatcgtcacggctgtcagcatgtgcagcggctgtatcatccggctccaggatgccttgatggaattacggtcgtctatcagccaggtcagcgccagacggggttccaatgcataataactattgtgcggagtatagaacgccgccgccctcagtccgatatttgcctgccagtgcggagatatcgtccagttgtcctccacatacagctcgccggaccagatgccacccttgcttgcatcgtcataccggacggcatcattagccacccgtctgtaagaggtttccggactgtattgcttgtgtgcaaaaactcctccgaaagagagacggtgggcatccgatatcataaattcccattccgatttcaacgtcacatcctccaatctggaacgaatcctcgaaacatcgtaatgctcgtttacataatcatacatccgcgatatatcctcacgccggaacagactgtaatagacctgcgtatttgtaaacagacgcggacccgccacatgattccagcgcaatgacaatccgatattgctccaactgttgcggttcttgtccggatgactgtcgtccagattccatttgtccgtagccgcatcacggctggtgtacaaactgaaataaaagcggttgcgcgacgatggtttccagttcaatttggcattcaaatcataaaagcccaatccggataccgcatcgccgccgctctgcatgcggtcgaccagcttcatcacaagccccatccacgaatagcgtccggtcacaaggaaagaggctgtatccttcttgatgggagcttccagtgtcagcgttgcagcaatcggactgagggtgaaattaccggcaaaacgtttcatattaccttcccgcatcgatacgtccagcaccgaagaaagacgtccgccatagcgagccggtatcgaagccttatacagacttacgttctgcaacgcctctccgttgaagatggaaaaatacccgaacaggtggttcacattatacaccgggataccgtcaagcagcacctccgtctgttccggacttcctccacgcacactgattcccgccttgccttccgaaccggaattgacccccggcagtgcatggagcgccttcatcacatccgcttcgcccaagatggcaggcatcgtctttatctgcgcaagcgaaagatcgtgccgtcccatctgagttccacccacaaaagaacgtttccccttcaccaccacctcttccagccagcctgcacgggaaagctggatgttcaaagtcgtatcggcagtcagccgtatcgggaccatcgcaggaagataacccacataccccacccgaaatgaatactcacctttcggaagggtaatactgtaaaacccgaattcgttggaggcggtcccccgtccggaggtcgtctcatacagcgttgcattcggcaggcgttctccggtcgccacatcctccacaaacccgcaaaccgtaatggatttctgggcatacacaccaagccccatccatattaacacacacatcaataacaatctgttcatatacttaacattaaaataccagtgcctccacgcacattagaatacatccatgaagaccgaagccgcacaaaccgataacaactgtcagtatccgtctcatttcctaaaacgccaaaggggaacttcaactgaaagattgaatgtcatacttttgggagtatgctccaaaaatatatcttcacccgcttcatgaaggacatgccgttgttcatccttgtccatccaggaattgatatcctgcctgaaagaaagggcaatcctgcaaaacttccgattccaggcaatgcctgccgcatatccgaacaccgcatgtttggacaacggatacatttttgcatgaggactttgaaccgaattgtgcacctcgtccgatgtaacggtttttccaaacagtgtcttcatatatacgccaccggtcagattaaagcgaaacttcgggaatacgacagcctgtagcggaatcaccaaagcattctttaatgccccccgattaatcagatattcctgattttcgttcaggaactgatagctgattccgctctgcacgccaatccattttatcggcacatagcggtaataaaaacctgcattgaatcctcctgccacatccgaaccattgttcttgccaacaggattcccgacaacaccccctccatgcacaccgatttcatgtttctgacaccatgctgcagacgatacagccaaaaagcaaaccaaaaaaacaaacacccttttcatcttttctatctttttaaaaatttcaatattataattcaattatctccgataaggcacacccggtccccatttccccggtttgttcggtgcatccagacgggtctccaccaccgaatacgacccgacaataccggtgcctccctctatattggagtacatttcattgggacgaaaaagccaaggttctatcgttgcagcacctatcatccggtaattatcaacaatacaacttaaataggcatcacaatgatagtctgcatttatcaaagagatgattgtttcaaaataatcactaggtaaagttttataagacaaatcaaagaatctttgctctgaagccactccttccacacgaatataagtattgtaaaaagtagagcatccaccccattcatccatgtcctgctctatattaaaacgatccggaagaggactttctgtatataaatctctttcccgaatccactccaacgaatcttgaatcaatacagagccctgctcctctgtccaatcataacgggttttcttcgacttacgacaagtcaaccaataatagtgtatcctgtcagccaaatcccgccaatggtatttagcctcaaaaccattggtaaaagtctcgctgcgcacttcctgccagatttccaatttatagtccttgatttttgcagggacagttgtctccccgctgacagtccccctgccggggactcttgccaccacccgataggtctgttccgcttccacccgacaaggcagtacaaaacaatctttcccgttccactccgcctgacctacgaattccccgtttttaaataacagtacctccgcctccgggaatgtcttccaggtggtcgtgtctcgtatcggtcgagtctgcgataccgccacccgcaccgtatcgtcaccttccaccaaaatacaattcaacaccaataccggcttctccttgccaaggtcgatacttatcacctcctcgcaaccccacaatccaaatacaataaaaataatagcacactgaatctgcttcattgtcatgattattatgattaatttcctatctccgataaggcacgcccggtccccattttcccggtttgttcggtgaatccagacgggtctccaccactgaatacgacccgacaataccggtgcctccctctatattggaatgcatatccttaggacgaaaaagccaaggttcttcaagaatatccaaacgcatctgctcgttttctatgatagatttcaaataggaatcacaattataatctgcgtttattaaggatgctattgcaataaaatatcccggattagaagatgtataagacaaatcaaaattataatcagaagcttttccctctatacgaatataatagctataatacgtataatatccatcctctatcatattcatcattttcttttggttaaaaggatccggaaggttactatccgtagttaaatgaaaatccgcatcccaattaagagtatcccgaacaacatcacgtggaaaaatattccctaaagaatctacgttctcagtagaaaaatcatattctgaatatccggattttcgaattgtcaaccaataatggtttactttatctggtaaatcctgccaatggtaatttacatgaaatggagcaccccaaacggtatcacgtacatattgccagatttccaatttatagtccttgattttagcggggacggtcgtctctccgctgacagtccccctgccggggactgttgccaccacccgataggtctgttccgcttccacccgacaaggcagtacaaaacaatctttcccgttccactctgcctgccctaccaatgccccgtttttaaacaactgaacctctgcttccgggaatgtattccaagtggttgtgtctcgtgtcggtcgagtctgcgataccgtcacccgaaccgtatcgtcaccttccaccaaaatgcaattcaacaccaataccggcttctccttgccaaggtcgatgtttatcacctcctcgcaaccccacaatccaaatacaataaaaataatagcacacaatatcagtttcatatccctaactaatacaaaaaatcatatagtgtccgatttttcggacactatacttgattaatacttcattatagattcaattgcactacctgcaactccattatagtcatattttaattttggagctgtataacctcttgattcatggtctatttcaacatgaaatgaagggaacttgccatttctgaccatggcaatcttaaaatatctacctccccgatcttcagaagaggtgataggaactgaaaaaccacccaattcatagctgatcaaccgacggacagtatatcttgtccgataagtcctccagcttttttttgaatttttccttttatatccttgctgatacaatgccaatacggttcgttcttcatggtcggctttttcaggataaagatccaatgcccacttgtatctccgattatctttgtgctggtctcctcctgttaaggtcataaacccgtctgcctgtcccgcccttgttacaggtaaattataataatctacaataacgccattttctgcatcggaatttacggcatctgcaaaagcttctattctgtcttttgaggcatttttgattgttattttccgattgtttttgtatatccacagtgtattgccgatttttatctttccgtcttttgaaagaatttctgcttttccatgaacattgaaaggataatccacatccaaacatccatcttcgtcaacaatcttaagtactccttggtattgtttttgaaaaactttcatttgctcatcatcttccaaatcatcaaaatcagcgaaataagacttaaaatgggaataggcagactcaaaaccgattttgcgttcccattctatcctttcattttcagacatttctatacacgtctgttccaacgaatccaatacatcgaaatcccttactaccaaataaccattttcaacacgaatatctccatccgaaacatggggtattcctcctttggttaaaggcatatcatattcaaaattcttgtcatctgaacaagagaacagtatacaaactactgcaaaatataatagtattttcatatttgttatatcaataagttcatttactacgattttgaataatgcattctaaggaaaaaacgtccttgccacccaccctttctatattcatgtaagaagggtttatcaacccctactccttgagaagaatgtaatatttctatatcgaaattaggaataatactattttctgttatagcaatatagaaatatcttccgccatgtcctcttggagatgttgtcttttcgtaattacttacatctattgttgttccatttacatgaaactttaatatctgacaagaatacctggttttatatgtactaccatttctaaaactttgctgatataaccctaaagtataccgaagttgaccatctttcctctcaggaagcaaatccaaacttattttataagcacgatgcttatctgtattatagaatacaattgcagtatctaccaactctatatgattacttggctgtccttttctagccttcggtcttgtatagtaatctacaaatacgccttccatttcatctgacatcatcgcatccgcatactttacaattctatcctctgttgcatcctcaatcgttactttgcggttctttttgtatatccataatgtattgccgattttaatcttaccgtctttagaaagaatggctgcccgcccacgaacatcaaacggatattcaatatcacaatattccccggtattgactacacctaaaatatctttatatttctcctggaatttaattttttctcccttttcagatagagcatcaaaagcatcaaaataaggcataaaatacgtataggctgattcaaatcccaatttcttttcccaagcagtctgttcttcatcagtcataagagtacacatattttctatagaatccaacacgtgccaatcctttaacaccaaatagccattttcaaccgttacatccgaactcattgcacgtgtccttgggatattattcatatccggagcatctgtcatgtccacaacctcgtttttctcacacgaaaaaaacgaaaatacaagtaataaataaattaattttttcatgtctcatttttttaattgtcaattttatttttctaccaaagctttgatttctccccctaaattacagcctttcttcatgattccgtgcaggtatatagcaaatttatggtggtatgccacttccttaagttgttatatacatgacaattgtacttgataagtgtaaaaaaagttggtatggctgctttttgagatactaccttatataaaacggtctcattttcttcccatatttataaatcaggtacgataacccttataataatccactaaatgagtattcgcaaacgtgtgcaatattatttagatggtttcgttgttttatcggtattttttatatgtttgccgtgtataaatatatggtataaacatcatgcaaaacataaaattcttttttattattagtattattatcttgtctggatgtgaaaggcacaatgaacgaattcttcagttgcttcaatcaaaagacatgcctccgtatgagttgctaagcacgttggattccatcgataatactcaacatttatccacagaagaccgatatgactacactttcctgaaaacaatagcccgctataagctaaaaaagatacaagcgattgatactttgctgcataaagaggttgcctattacgatgaaaaagaagatgcagaaaaatcagcatttctcctgctgtgcatcggacaggcataccgtcaggctcatctctatgaacaatcagacctacactatatggaagccgcagtcaaagctgaaaaattaacggatcaaatgcttatgctgtatatttattatgaaagaggcagtctttattctatgcttaacgacaaggaaagggcagtacaactctttgaaagtatgatgcaattagccagaaaagattccctgttgaaaaaacaattggaaaccacctatccgtttttagatgctttagatgccctgctgtatcttggcgaatatgaaaaagcaaccgaatggtatcaaaaaatatacgaccatgttattatgcatgccgattctacaacagtttccgcaatcgtttacaagatggcttattccctatacaaacaaaatcatttggaagcatcccaatactatatcaaacgctctttggaatatggatgccaacaggaaatcctgctgaaaaatctttttttgctggcaagtatatacagcaaagaacaccagatagacaaactaaagaaaactttggtcaaagctaaggattatctgacacccgataacatcaaaggacgcgaaatttattactggctgttaggagaacagtacagtctggaaaaaaaatatctccaggctctggaggcattcaaacattacgatgccattacagatacgacatgggtcagaaaatcggatctccgcatgaaacggatgaatgaaacatataaattgatgaaagctgaatcgaagaatttaagattacagaagcaatacctgatgacagtggttgtaggattgctgattacactatgtatcggtttgattactttgtatttttatcttcgctcccaacgccgacataaacaatatcttgaaatagaaaatattaacctgaagcttaatgctttgttggtagatagtacgactaaaatacagaaattattatcccatagcctgcataacaccaagaaattggcacagataaagaatttcaattctccgaaaagtgaagaattcattcaattgtatttccaatttttcaaagaccagcaaaataggagtaatgaagaatgggagaatatctattttgccgttaattccttgcatgataatttcaaggacaaactgactgccacattccctcaaatttctgaggatgacatcaaaatgtgttgcttggcatgtatcggttttaatactaatgaaatagcatttgtcatgaacttaagtccccacaccatacataaaagaaaaactatgttgcgcaaaaaactcgatatgcccgaaggtgcggatatcatcgaatttcttgaaagcaactttaaatagataagatgcgtttttgttacctcagcctctcataaaattccagcagcaaaccgtcaggatcttcaaagcaaagaaaaccaatgtaatgaactttattgacatttgtttatgtccgattcaattccatgacaaagatatgacaactacatatcaaagataatagactgttatctttgtcttatagatgtgttatatttgatatatatttgtcatataattaagtgggagcattgagggtgcaatgtaagcggcagaacgaaccgcaaccgccgttaattctgccgcaaatgatattttttacagaagactgaaggtgcaagtcagacctgccatgacaattgccaccatgctcatcagtttgataaggatattcaaactgggaccggaggtatccttaaacgggtcgcccacagtgtctccaatcactgttgccttgtgacattccgagcctttgccgccaaaatggccctcttctacgtatttcttggcattatcccatgctccgccggaattagccatgaaaaccgccaaaacaaatcctgcgcccaaaccgcctgccaacaatcccaatacacctgccacaccaaatatcagaccgataactatcggcacaatgattgccaacagagagggaaataccatctcccgctgtgcgcctcgagtggaaatttctacacaacgggcatagtccggctctgccttgccttcaaggatgcctttgatttcacggaattgacgacgcacttcattgaccattttctgtgccgcacgtcccactgcattcatggtgaggccacagaaaagaaatgccatcatcgaaccgatgaatactccagccaagactttagggttcatcagattgacatcgtaataggtcatcatgtccttcaagcctgccgatgccgtgttgatgacgttgtctccaatttcaagcgtagtgtgtcccaaacggatcagaccgatttttatctcttcaatataggaagccagaagtgccaaaccggtcaatgcagcagaaccgatggcaaatcctttaccggtggcagccgtggtgttgcccagcgcatccaaggcatcggtacgtttgcgcacctcttcgcccaattcgctcatctctgcattacccccggcattgtcggctatcggcccataggcatccgtcgccagcgttatgcccaatgtggagagcataccgactgctgctatgcctacaccgtataatcccatcgacatgttgcccatatccatttccgctgcaaagagataggccaatatgattcccacaacgatggttatcacaggtattgccgtagatatcattccggtacctatccctttgataattacggtggctggtcctgtctctgcactgccggctatgtcctgcgtcggacgataggcatgggaggtgtagtattcggttgctttgccgatgacgataccggtcagcaaaccggttataaccgaaccgcatatccaatagcttaaccccaacaggtgaatcactataaaacttgccactactatcaaaacggaactggtgttgatgcctctatccagcgaacgcaataattgcaattgtgtggcaccctctttggtttttaccaggaaaatacccaacaaggacagaatgacgcccaaggcagctatcaacatcggtgccaggatggcgttaaactggagttccggtgaggcgataaaagccgccgctcccaaagccgccgttgccaacaccgaaccgcaatacgattcgtacaaatcggctcccatccccgccacatcacctacattatcgcctacattatcggcaatggttgcaggattgcgcggatcgtcttccggtatgccggcttccactttgccgaccaggtcggctccgacatcagccgccttggtgaagattcctccccctacacgtgcaaataaggcctgcgtggaagctcccattccaaaagtcagcatggtggtggtaatcatcaccgccttgtgggttgcatctgcctcttctataaaataatccagaaccaaccaccacaacgagatgtcaagcaatgccagaccgaccacaaccaaccccatcacggctcccgaacggaatgccaccttcagaccgtcgttcatactgcggctggctgcatttgccgtacgggcagaggcataggtagctgtcttcatgcctatgaatcctgccagacccgaaaagaatcctccggtcagaaaggcaaaccatacccacccgttctgcaatcccggtccgtatgccatccaagcaaagaagatacacaacaccagaaatacaatccccacaattttatactgctgttttaaataagccatcgcacccttacgcacgtggccggcaatacgcttcattgtctcgttaccttccgactccttcatcatacccctgaagaaaagccacgcaaagaacagtgctatcagcgagcaagcaggcactatccagaatagatgattaatcataatcttgaagtttaaatgttagtagtaacacaaaattggaatttatttttgtaaaaacaaatagggatataaagaaaaatcggctgtccgacaagcagacagccgattttaattcaaataaatgcagggattctgtccctgacatccaatttccgagcgacagcttcttattctgcagattttgcaggagcagcagtgtaaacaatcactacttttccatctgcatttttcagagtcaactcctctttgcttacagcataggttttcacttcagccaaagccttcatgtatttgtcctcaaattcaatgtcaggacaagtcatcaaagtgattccgccaggcactaaagtgatggcacctttgtcggctgtagtgtaagtaccgaagaagcggttgcaaccagcacttcctgccattttggtactgtcgctaaatgccaatacaggcaattcagcaggattagcaacaacagttccgtctgtagtaaacgactttaactgccattcgtggctttttaacaaagctactgaatcttctcctcctttacagcttgcaaaagctgctaccaatgctacaagcattactgtcatcattcttttcattgttttccgatttttataaattaaacttggtcttcttttatcacttttgcataaaggtcgtactcatccgcccctgtgatttccaccatacagaattcgccaaccggcaattcctcatcggtttcaaccaatacttccggatccacttccggagagtcgtgctctgtacgtccgatataatactcctcttctttcctgtctaccaatatacgcatccgctttccaatcaacgaagcagacaattgtgcagatatgtccgcctgaatcttcatcacggtctctgcccgctcttgcttcacttcttcctcgacatcatcccggtaataacggtcgcaataggtgtcgtcctcgtgcgagtaaggaaatactcccagacgttcgaaacgcatctcacggacaaagtcgcacagctcttgaaaatccgcctctgtctcgcccggatgaccaaccatcagagtggtacggataaagattcccggtacttcctccctgattttacgtatcaggtcgatagtttgttgcttggtcacgcctcttctcatcattttcagcatgtggtcgctgcaatgctgaagagcaatgtccagataacggcatacattcggatgttcgcgcatcaccggcaacaactcctccggaaaacctgccggataggcataatgcagcttaatccattctacaccctcgatatctgcaatgcgtccgattagttccgccaaacggtttttgccatacaggtcaatgccatagtaggtcaaatcctgtgcaacaaccagaatttccttaacgcctcctttcaccagttcacgacattcgtccaacagttcgtcaaaatcacgcgatttgtgtttgccggtcataatcggtatggcacaataggaacaggtacggttgcaaccttcagaaattttcaagtatgcataatgggatggtgtcgtcaatattctttgattacggatactttcatcaaagtactcacccattttttccattacacctttccagtcgaatttaccgaagaatccgtccacttccggtatttcccgtttcaaatcctctccataccgctgagacaggcaaccgataacgtatatctgcttcaccaatccctctttctttctctctacctgctcaagaatcgtattgaccgactcttcttttgcatccccgatgaagccgcatgtattgacaatcaccacatcagcatccgaattttccacatctacttccgtcgcatatccagctttgtccagctgtttcagtaacatctccgtatccaccaaatttttggaacaccccagactgattatatttgcttttttcatacgtgacaataagtaaaagaagttttaaggtccgcaaaggtagtaaaataaataaatctatctacttttgtccgattatttacttaaaatatgaatacagaacaacgacaatggttaccgacttccgccaaggaagtgaaagaacggggatgggattatctggatgtcattcttttttcgggagatgcgtatgtagaccatccatctttcggagcagccgtaatcggccgtctgctcgaatctttaggtctgaaagttgctattgtcccccaaccaaactggcaggacgatttgcgcgacttcaaaaaactgggttgtccccgtctgtttttcggagtttctgccggctcgatggactcgatggtcaaccactatacagccgcacgccgcagaagatcggacgatgcctacactccggacggacgtgccggtatgcgaccggatatgcctacgattgtctacacccgtattctaaagcaattatatcctgaaacaccggtcatcatcggaggcatcgaagcatcgttgcgccgactgacccattacgactactggaaagattgcccgcaaccttccattctcgcttcaagcggcgccgacctgctggtgtatggtatgggcgaaaagccgctgacaggcatttgccgtatgctgaaaaagggagtgcctttttatagtttgactaatgtaccccaaaccgtggtgatccgccggcaaggagaacaggtggcaggcaacaagaaatggcagaccctgcaattgcactcacacgagacctgcctgcaggacaaaaagaaatatgcagaaaacttccggcacattgaagaagaatccaacagcgtggaagcggcacggctcatccaacatttaggcaacgaccaaatcattgtcaatccaccttatcctccattaacaaccaaggagctggatgccgtatatgccctcccctttacccgtctgcctcatccgcgctacaagggaaaagaaatcccagcatacaatatgatacgccactctgtcaccatgcatcgcggttgttttggtggatgtgccttttgtaccatttcagcacaccagggtaagtttatcatctcccgttcggaagaatccattctgcaggagctggaccgcattacacaaatgcccgattttcacggtaccatcagcgatttaggcggcccgtctgccaatatgtataatatgcacggcaaagacagttcgctttgcaaacgctgcaaacgggcttcatgcgccttccccgttatctgcaaaaatctggatacaaatcatgcctccctgcttcatctttatgaagctgccagaaaacgtccaggaatcaaacactgttttatcggatcaggcatccgctatgacctttgcctgcacgacaccggtgacaaacgcaccaatcagactaatcgggaatatttggaaacagtcatccgccaccatgtgtcaggacgattcaaagtggctccggaacactcgtctgcccgggttctcaaaatgatgcggaaaccgtctttcacacttttccaacaattgaaaagtctgtttgacaacatcaacacccaatacaagctgaatgagcagattataccttattttatatcatcacatcccggatgtcgtccggaagacatggcagatctggctatcgcaaccaaagagctggacttcaagctagaacaggtgcaggattttactccaacacccatgactgtcgccacaacaatttactattcaggctatcatccctattcgctgaaacccgttgcaacagtgaagagtgcccaagagaaaaaaatgcagaacatgttctttttctggtataaaaaagaattccgcgaacagattactgctacgctccgaaaaataaaacggccggacttgctgaacaaattatacggcaccggtgaacagcggcaaaaaaagcgtacaaaattttaaatatgtcaatgttattttttaactttgtcaaacagtagtctgaaagacaatatttatgaggtatcttttttatggcatcgcgtttcttttctgtttgtctgcctgtaatacgcaagtaaaacaagcaaacaaacggggtttggagtatatgaaacagcaacggtatgaaaaagccatcactgaattcaataatattctggaagcagacccgttgtggtttccagcctattacaaccgggctatttcgtatgccaattccggccgcaataaagaggctttgcgggatttaaattatgtattggccaattatccggacaatgcagatgcctattttaatcgagggattgtatatgagaatctaggttctttccccaatgctatcaaggactatacggaaacgcttcaattaagaccagattttatactggcataccactatcggggaattgcacgttttcgtatgctcgacttggacggcgcactggaagattacaatcaagctctggaattagggaaaaatgtcctgatggatgcagctacggcaaaagaatatggactcaattccagcgcactgtacttcaaccgcggtgccgtattgcagaaaaaaggcaacctgcagggagctatccaagattatacacaagccatcaatatcgacccggcaagtgcacaaagttacttcaaccgggccattgcccgcctctccctctctgggctggaagaggcgaaagccgacttggaaatcgcctcacggctgggatttacgcaagctaatgatgtgctccaaaagtattttgacaatcattgaaccgctattgctgtgaaaactctttgattcgctgttcatccgacttgcgacatatcaacaagactccattttcttcggcgatgatatagttttcgagtccttgcaataccatcctccgcccggtcgggacgtgaacgatgcatccgctactttcaatcatcttcacttcgttgccaactacggcattttgcgcagcatcttttgcaacatgctcgtaaagcgaaccccacgtacctaaatccgaccaaccgaaagaagccggaaatacatatatattccgagcgtgttccatgatggcataatcgatggagatgcttttacattccgggaaatagcggtcgattgcctcctgctctcctattgtaaaaaatagattttccaaacagtcgaacaaggctgccatttccggcaaataagtacgaaaagctttttccacggtatgcacattccaaaggaaaataccggcattccacaaataatcaccggagcgcagataggattgtgctgttgtcaaatccggtttttccttaaatgcctccacttcatgaatctcttcctgataaacagttgtattggctttcatctggatatatccatagccggtttccgggcgtgtcggcatcatacctaaagtcaagattctctctttgtcagccacaaatttcaaacctttatccactacacgccgaaactctgcaacatccaatacgatatggtcagatggagaaactaccaaacaagcatccggatcctgctttttgattttccaggtgacataggcaatacatggagccgtattacgcatgcaaggctccaataagatgttggaatctggaatctccggcaattgctgctttaccaactcacgataacgcaccgaagtcaccacccatatattcccgatgggacaaatatcagcgaaacgctcaactgtcagttgcaacaatgttttacccgttcctaaaacatccataaattgcttagggcattcgagtgtactcatcggccaaaaacggcttccgacaccaccagccataataaccaaatgattcataagcgccgtgttaattaatcaccacaagaaaaattctccggaaatttcggatttgcatcccgataggtttccattatatacttcaaatccgcctctatatcatcagtaggatgaaaaagaggacctacttcacaatatttacctttataatctattcgccctaaatatacaggcacccctgcagcctgagcaatgacaagaaatccttttttccatttcttacgttttttacgactaccttccggtgtaatacaaagatacatagaatcacgtcgtttgaattcgctcaccatctgctccaccaactggctgtccttattgcctctgtcgacaggaatcaccctcaaagcccgcaagatagcccccaacggaaaaaagaaaaattcttttttcatcaaaataaacgagggaatcccctgactcaaaaatgacagttctccccacacaaaatcccagttcgatgtgtgcggtacagatataataacggcttttttctcctttggcaactctcctttatacttccatccccccagccacataataaatcgtgcaatatatttcatagtccacttatttacgtatcaataaatctgcaacaaaaataagatttttttctcaataaccttttgtatcttcaaaatatatagtacttttgcaccacaaattttccttaggggtataataagtggtcgaagacccacctcgtggtattaacactaaaaacattatcaaatgtacgctattgtagaaattgcaggacagcagtttaaagtagaaaaagaccgtaaggtttatgttcacagacttgcagcagaagaaggtgctcaggtagaatttgaaaacgttctcctcgttgacaacgacggtcagattaaaatcggtacaccgaaagtagaaggagctaaagttaccgcaaaagtattggcacacgtaaaagcagacaaagtgattatcttcaagaagaaaagaagaaaaacttacgagaagaaaaacggtcaccgtcagtgcatgactcagattcaaatcgaatctatcaacgcttaatttatttttgtaacctctaaaattatttatacgatatggcacacaagaaaggtgtcggtagttctaagaacggccgtgaatcagaaagcaaaagattgggtatcaaagtattcggtggacaatttgctaaagcaggtaatattattgtacgccagagaggaactgttcacaacgcaggtgagaatgtaggtatgggtaaagaccacactttgttcgcattggttgatggtactgttgttttccgtaaaagaagaaacaacaaatcattcgtttcagtggaagctgttgcagaataagctgaaaaaacaatgaaatatcagactcctgtattctgctcgaatacaggagttttttataataacatatacactacgctatgttaaatctgaaatttatccaggaaaacaaagaaactgttatcgaacgtttagctgtaaaaaacttcgatgcacgtgaatctgtagaaaaaatcattgagcttgacaatttgcgtaaatctctccaacaggaagcagaaagcaaacaggcacaaatgaatatcattgccaaacagattggtcaactgatgcaatcgggacaaaaagaagctgcagaaaaagcacgtcaggaaacttctgacctgaaaacatctatagctgaattgaacaaccgccgtaatgatgtaggtactgaactgaccgacatcctgctacgtttaccaaatatgcctcacccatctgttgcaagaggaaaatcggatgcagacaatgaaattgtaaagattgttgaaaacataccgcagaaacatgaaaacgacctgccacactgggatttggcaaagaaatatgacctgatagatttcgaaaccggcgtaaaaatcacaggagcaggtttcccattatataaaggcttaggagcccgtctgcaacgagcattaatttatttcttcctggaagaaaacatcaaagccggctatcaggaagtacaacctccattgatggtaaatgccgactcaggatacggcacaggacaattaccggataaagatggccagatgtactatgcaaatgaagataatctctatttgattccgacagcagaagtacctgtcaccaacatttatcgtgacatgattgtagaaggtgaaaaactacccatcaaaaacactgcatattccgcttgtttccgtcgtgaagccggttcttatggcaaagatgtacgtggactgaatcgtctacaccaattcgacaaagtggaaattgtccagattacccgcccggaatggtcttacgaagcattggacggtatggtaaagcatgtggaaagcctgcttgtcaaattaggattaccttatcgcattgtacgtctctgtggtggtgatatcagtttcacttcagctttgacttacgacttcgaagtatattcaaaagctcaagaaaaatggctggaagtcagttcagtatccaattttgaggaatttcaagccaatcgcctgaaactccgtttcaaagataaaggagacaaaaaaacaactacttgccatactcttaacggcagctctttagctttgccacgtatcgtagctgcattattggaaaattatcaatgtgcagaaggaattaaattaccagaagtacttcaggcattcatgggtacagatattataaaataacacaaaacatagatagacagatggtataccatatcatttgtctatctttttcatagcctcccaatataaagcagtatgagaatcatctacaacaccagttttatcattgatgaagcaatagaacaagagtgggtggcatttatgcgccaacattatatctcacaattgcggaatcataatctttgcgatgatgtcatctttacaaaagtatcaattgaccaaccggaaggcaagacctattccgtacagattgtatttgcaaataacgaacaacaagattattttttaaataaccacctaccggaaatagaacaaaaaatcatcgcacaatatgcaaatagatatgtttgctttagcagtgtgctgacagaaatctaaacatatggaaaaactgattatgggtatcgacccaggcaccaattttatgggctatgccatcatcaaagtcaacggcaaaaaacagaagccagaattggttgtctccggagtccttgacatggagcaaatttctgacccatatatcaaattgcagcgaatttttaagcggacactacaggtcattgacagttaccaacctgatgagcttgccatagaagctcaattctatggaaaaaatgtccagtccatgctcaaactcggacgagcacaaggagtggcaattgcagctgctctgcaacgagatattcccatatttgagtatgcaccccgaaaaatcaaaatgagcgttaccggatccggcactgcctctaaagagcaaatagctttattgctaaacaagttcatgacgattacaacctcttcgtccatgctggatgaaaccgatgccattgctattgcttattgccactacctacaaagcagttctccccttgcgtctgaaggaaaaacatgtaaatcctggagcgattttattaaaaaaaatccggacaaacttgtataagctggcccggaaaaatatcaaggttgattttaccatcctttatcgtaacagactactgatggctgcagaggccttctctacacttgttacatcacgtccatattctgccacttgtaccgttcctcccatcgacactctgggattgcgatacaacatacctccttcaacggacatacgggctgacagatgaaactcatgagctccggtttctttggctatctttgcaatattaccagcattgataccacatcccggcataataatcacattattcgccttttcaaccaattcctttaataaaggaataccagcctctgcagaaggctgctgtccagaagtcaaaatgcgatgacatcccaactcctcaatatcctgtaaagcagcaaacggatcacagcacatatcaaaagcacggtggaatgtaacagacatctgtcctgcaacatccatcaattcacgcatcatttttacatcaacgtttccttctgcggtcagacatcctaatacaactccatcaacacctattctacgagccatctcaatatcacgcatcatcacctcacactccaactcgttgtacaagaaatcacctccacgaggacggataatcacatgtactccagatggcatcaactctctcaccaaactcatttcaccataggaaggagtagttcctccttccggcatgccagcacataattccactctatcagctccagcctgcattgcagctttcacactctcagcggaattggcacatatttcaattttaaaatctttccgttccatttaattcaaagtcaactcaacaacgtagtctatatcattcggaacttccggaaattcaaggacaacaccttctttatcctgacggaattttaccggattaccgtttttgaataaaacagctttcttcaccttctgatttttcaatggcaagaacaatcctttgtcttccagattcagtacatgcacatacaacttatttcccttgcgagtggtaacaccccaatcacgcggagtaacatctccgcctcgagtgccatagatagtttctccatacaccttcatccagtcacccatagctttcaaacgtgcaacagccacttccggcaattcaccattaggctgcggaccaacattcatcagcaaattggcattacgacctgctgcttttaccaaataatgaattaaagtctctactgatttataattctggtcaacaatcttatatccccacataccattcattgtttcacaagtctccaaaggcaagcgactgatatcttgtcctgaaagaccggcagtattttcacccggaaggtcacgttcgaaaatctggatatcctctccttcaaaaggcacctgatgatgattatttccaatcagacaagccggctgtaatttatgaatcatagcatactgctccggtaattgccaatcaaaatccggatcttgatcatgatcccacagaccatcgaaccagattgcacctattgatccataattagtaagcaattcagttaattgattgttcataaattcataataagtcttccactcgccatgattcttgcgtcctgttccatgtcctgtgcgtcccaatggataataatcctcacgatcccaatccaaatgagaataatacaagtgtaatttaataccatgcttctggcaagcttcagccaattcttttacaatatcacgtttaaaaggtgtggcatctacaatattataatcagaaaacttagtaccccacattgaaaaaccatcatgatgacgggtagtaaaacaaatatattttgctccagatgccttgattgcagcaacccattcatcagcattaaaaagagaaggataaaaaccggaagccaatttacgatattccatatgatccaaattctctctatgcaatacccattccccttgggcaagcatactatagagtccccaatgcaagaacacaccaaacttattgttttgaaactcctccctagccttcaaattttcaggagcaggcacataattctgagcccgaacagctgtcaatcctaacaaagacagcaaaataatgcttacatattttttcataactaactatttatacccgtttaccacggaattatttatttcactttaaaatccatgagtatccgaccacagaactctatttgcaaacgatcccctgttttcaactccttataacgaaacgtattaccaccatataaaaaatctccaatcttcaatgtatgaaattcagacgataaagtaatcaacctctccatactggcaatttgctgctccttacctccacgataaactgttacgccattcactttcatttcatagactgcatcttcacatgattcgatgggcagcaactcactaatggcagcactactgccaaaagacgaagcgacaccagcaggcaatcctctctccgacagagaccgttcaagatcatctgcataaaaacggatgccaacacctatttcttcataatatcgcccggcaaaacgttcacttacgtattttcccaatttgcacaaacgcaccaccaattgtgggacacagctcaattcactggaaaaatccggaatataaaaatcatcattattccgcaaaagtacgtcatcccccatcggcacaatagcaacctctccggcggcattatattcagcacataaaatcttcatcgtacaatcaattcatcaacactacgcttgggcacatgatgcacaccctttgcatctctccaatacttataatcttcagtctgcattgtttccaacaccacctgttcgaccggagtccccaaagctataacatacatgattttcaaataatcagataaagctaaagtttcacgcaaagcttcattcttaaaagccttgataatacatcccccacgacctttttctgtagcccccaaaagaatagtctgagcttgaattccatcatcacacagacaattttccacgatacgtgtatccaacacttgtatcagataagcagccggacgctcaccctctacaggtcctgcccaatcggtcagataaccggcccatgccaaatgtgggaacacccgagcacactcgtcttcatcatgcacaattacatactttaaagcctgtgcatttcttcctgatgcgcacaagcgtgtcaatcccaccaattctgtcaactcctcttcactcattcgctcactttgacgaaaacggcgataactgcggtttttcgctaataaatcttttaacattgatactaatttagcatttttacttcatgaaaatcgtaaatttgccctatcgccacatgataggcagagcgagacaaaaataacgaattacttggtaaaactcacatagtttattaagtctttttttaacataaatatatggaaacatttcttcaacttctggcaagcgacatcgtcaacaaatatggtgaacaattcagccacctaactattatttttcccaataaacgcgctggtttgtttctagccgaagaattgtccaaacttatcaaacatccggtatggatgcctgaaatcctaaccctttcagaatatattgaaaaacatacaggcttgcacaaagctgacaatctgactcttactatcaaattatacaaagcatatattgaagcttccggaagccacgagagtttcgaagaattctatttttggggaagtatgctgctaagtgatttcgatgatgtagacaaatatcttgcagatgccaaagatcttttctctaacttagttgctctaaaagagatagaagccaatttcccctatttgacagaagaagaaattactgccattcaaaacttctggagcagttttaatcccaacaaattcagccacgaacaagaagaattcttaaacgtatggagcaaactctatcccacctacaaagcattccgtactatcttacagcaagaacatatatgctatgaagggatgaacgaacggtatttctgtgaacatatagacgaataccagcatccggaacacttactgattgccggtttcaatgcattgaacatctgcgaaaagcatattttttcttattatcagaatctagggaaagcctccttctattgggactacgatatctactatactgccaatgaacatcaagaagcaggattttatatccgggacaatctaaaattatttcccaatgaattggatatgggacatttcaacaactttctgcacaatggcaaaaagattgaatacatttcagtaccttcagctgtcggacaagccaaattacttgagcaactaaccacgcatctggttcatgaaaatcctcgcgacacggccattgtcctttgcgatgaacagatgctgataccaactctacattccattccggaatatattagaaaaatcaatattaccatggggtatccagcccgcaagacatctgttgcagccttgctaaccctattatgtgatttaaaaaactatgccaaacaagaaggcaataaaatttattactactacaaacctgtcattgccctgctaaaccataagttgataaaagagttgtgcccgaaagaaatcagccaaataacagactttatcaaccaaaagaatatcatctatatacaagagaaataccttcttttccatccattgacaaaggccattttttcccctgaaaaagaaaatataccatcctatctgttgcgtattttaaatctgctcacccgctccacactaggcatggatgccgatcccattgaaaaggaatttatcttctccatatacacccaaatacaaaatctgcaaaataccttcaaagaagaaaatattgaaccggaagaaaaactatacatccaactgataaccaaagtcattaataatatcaccattccgttctcaggagaacccttagaaggacttcaactaatgggattaatggaaacccgcatgcttgattttaaacacctgatcgtattgtcagccaatgaaggcgtattacccaagacctctcttccatcctcgtttataccttataatctccgcgtaggcttccgcttaccaacgccacaacaccaagaagcactgttcgcctattatttttaccggttattacaacgttcaaaagatatcaaactactctacacatccggaatgaaaggactcaataccggagaaatgagccgtttcctatatcaaatgcgatacgaatccggtctgcccatcaaagaaagcagtttccaaaaccgtatatcagtccaaaatccccaggaaatcaccatcccgaaaacagaggaaattatggaaatattgacccaatataaaatttccgaccaaaagacgctttcgccatcagcaataaacacctatttagactgtccgttgcgattctatttcaaatatattgccaatatcaaagaaaaagaacaaatagcagaagaattggatcaaagacttcttggaaccatcttccatgatagttcacaatcactctatacaactgtcccggaaggaaagattacccaagaggcaattgactccattctaaaaaatgacaaactgattgagtcccatattcaaaaagtctatgaaaagatgtactcaacacaaatatcacaacttttagacagcggaagcaacgaattactattgaatgttgtgaaaaaatacatccatgcaatgctacgctatgataagagtatcacaccttttgacatacttgctctcgaacagcgtttttatgtacctgtttctttaaaaatagacggccaaatacaaaccatattcatcgggggatacatagaccgcgtagacaaaactgcatcaggtatccgtgtcattgattacaaaaccggtgccgacaccactagcttcaaaaatatcccgtcaatctttgatccagaaaatccaacccgcaacaaagcggctttacagacgatgctctattgcatgatgtacaatcatacaaaacctagcgatttgccgctcataccgggtatttacaatacgaaacaactcttcgacaagagttacgactatcatctaatatgcggcaaagacaccatcaacaatttcagacacttcgaaaaagaatataaggaagaattatgctctctactaaacaaaatattttcacttgaatatccgtttacccaaacagaaaatgaaaaaaagtgcacacattgcagctatgccggcatttgccggaaatagctactcctccaacagatcagggcgcaaagccttggtccgttcgtaggcaattttctcctgccactcatgaatcttggcatgattgcccgacaataaaatatccggcactttccatccattaaactcagatggtctagtgtatacaggaggagccaggagattatcctggaaagaatcgctcaaagcagaactctcatcattcatggcacccggaatcaaacgcacaatggcatccgtcatgatacaggcaggcaactctcctcccgtcagtacataatccccgacagaaatttcgcgcgtcacgagataatctctgatacgctggtcaattcctttataatgcccgcaaagaatcatgatattctcctttaatgacaattcatttgccattttctgattaaaagtaggagcatcaggtgccgtataaataatctcatcataatgtctttgagatgtgagttcttgaatacagtcaaacaccggctgaatcatcatcaccaaacctgcctcaccaccaaaaggataatcatccaccttccgaaatttatccttagaccaatcacggatattatggatatgaatttcaacaattcccttatcctgggctcgcttaataatagaatgattcaacggacttaccaataactccggaacaacgcttaatatatctattctcataacctaatgaccatctttttattcgaacggcaaaggtaataaaaagcgagtggctatcgctaaccactcgctcctttttattgtgttttctctcttatttcaaatagtcctcgaaataattggtcactttctgcattaaatgaatacgatctttacccatcacattatgttctgcacacggataagggaaataatccacctgcacattatttttaatacattcacggataaagctcaagctatgttcccataccacaacattatcaacagccccctgacaaatcaacaatttacctttcaagtcttttgcttttttaatcaggctcactttctcataaccggcagcatttgtatgcggagaatccatataacgctctccatacatcacctcataccatttccagtcgattaccggacctcctgcaacagccactttaaatacatccggataattggtaatcaaagagattgtcataaaaccgccataactccatccgtgcacacctatacgttcagcatcaacgtaaggcaaagatttcaaaaacttgataccttccatctgatcggccatttccgcctgaccacactgtccgtggataaccttttcaaactcagctccacgattagaagttccgcggttgtccattacaaacacaacataaccatgctgagccatgtacatttcccaacgacgcaactctcccaaccaagtattctttaccatctgagagtgaggacctccatatacataaacaatagtcggatacttcttggaagcatcaaaattcatcggcttaatcaaacgataatagttatcaaattttccatctgcagttttaacagtacccattgtaatttcaccgaagttataatctttcaccggattctcggctttcaacaactcttttacaatcttgccgtcattttgaaccaaattaatcactctcggaacacgcaggctgctataattatcaacaaaatacttcttatcacgactcatgttgatattgtgccaaccttccaccttggtcaattgtgttttctttccagattttacatccacacggaacagatggttgtcaatcggactaacttcagccgaagtataatatacatatttggcatcttgtccgataaattcaacatcagcatcaacattcgtcaaacgcttcagaattttaccggtaactgcttcaaccagatacagattgaaataaccatcacgattatttgtacgataaataaacttagatgcatcgttctttaaaaatacaatcggagtctgaggttcaacatatgtttcctcatttgcttctgttaaaagagtttttacaaactgaccggtcttagcacaatactgattcaaatgcatatgcttttgcgcacggtcgagcacttgaatatagataaaatcagatttcggtccccaggtaatattggtcagatattgctcacgtccaaaatcagtaacatccataaatacagtttttccagatgctatatcataaactcccagactgatttgctcagatttcataccagccatcgggtatttaatctcacgcaaagaaccggtacggctattgatatcaagcaacgggaatgtacctaccaaactttcgtccttacgatagaaagccagctgttttccatccggagaccagaaaataccgccagaaataccaaattcattacggctgactgtctgaccattaacaatattcaaatctttatctgccgttactgcatactcattgttattggcatccaaataatatagattattatctttagtataagccaccaattccttgccattcggagtaatattctgtgctccgtcagccaatttatatacatggcttatctcttttttcactacatcaatcgcaaaaatctttcccagacgtgcaataataatattattagcatccttccaagaaaactgcggcatacctctaagagaagtattcaaaatacgattcaaatcctcaagagtcaacagcacctcttttttaccgtcagcagcattttctccgactaaatttgttccttcaatgtaagtcagcacattctgatcagccttccattgtacaaacatgttctttgggtgaagattatagcccaaaatggcctcttccatcgtcagcactttatcttgtgccatagagttaaacatcatcgtaactccaataaatgttagtaataaatatttcatagattaataattaaattttagcacaaacgtatgcaaaaatcctaacaataggaaattcacttataaaaataagcctttttgcttattgcaatccattttcatagtaaataaaacaaaggcgacttaagagccgcccttattatcttcaataatcttatacattccttctacaaataccccctgctcaatatgtatttttcgggtcaggatattaccacgtatatgagccggcttattcaaaaccaaattatcatgagctacaatatcacctttgacttcacctgaaatcaaagctgattcacatgtaatattcccctctactttcgcactgtttgtcagcactatacgtctagacgtgacaatatcacctttaaattcacattctatacgtaccggccgttctgtttccaaattaccgacaaccgtagtcctggttggcaaacaaacaaaagtatcgctttctcgatctttagatgtattatctgaattcttttttttcaaaaacaacattatcacgaagcattataaaccgacaaaaacacaaattcaatcgctcaagacaaaagtaatatattttttcggaattcaaatctaaaactttgttataactcaaagaaatccctatcctccaacacggcaaacttacgacggaaatcatgcaaacgctgcaaatcacattctccaataagaatctcatccccatattcggttgccacacattgctgtctgccacgggcatcccatataccagaatcaccggcatagcgcaatccgcatccgtcttcaccggcacaattcacggcaacaacgtaacattgattctctatagcacgggctttcagcaaagtattccacacatctctccgcgaatcgggccaattggcaacaaaaacagccaaatcataatcatccacattacgacaccagaccggaaaacgcaaatcataacagatgaaagcagcaatcttcactccccgaaattcaaataccaaccgattctttcctgccgaataatgctcgttttcccctcccatccgaaaacagtgccgcttatcataaaaaagctcacgaccatccgggaaagcgacaaccaatcggttataataccgctctccctcctgacaaacaaccgaccccgccacaacagcatcctgcctcgcagcccactcagacatccgctggcgagtctcttcataataagatgcaaccgctattttctctgccatagcctgctccgccgatttcttcaccatcatacaccccgaagtaaacatctcaggaagcagaatcaagtcacaatccaagcaagaggaaagcttccggtcaaaatttttcaaattctcctccacctgtccccaggcaagagaagattgtaataaggctattttcatcattccgattctttcatcatgcagcaaagttatatatttttattacttttgtcggcatactaatcaaaagtaaagcatgaatacgacaataatcggtgtagctggcggtaccgcttccggcaaatcaactttagtgaaaaaactacaggaagctttcaagggcgaaagcgttattactatttgtcacgactattattataaagctcatgatgagctaagctatgaagaacgtacccaattgaattacgaccatccgtcggcattcgatacggacatgatgattgcagacataaaaaaactcaaagagggcatagccatcgattgcccggtctattcatttgtcaatcacaaccgcaccgataagaccttgcacatcaatccggcacaggtaattatcattgacggcatcctaatcctagaaaatcaggagttgcgcgacctgatggatgtcaaagtttacgttgataccgatgcggatgtccgcctaggacggcgtctgctacgcgatgtacaggaacgcggcagaagcatcgaatctgtattgtcgcaatatttttgcaccgtgaaacccatgcacgacgagttcgtagaaccatccaaacggtatgccgacctgatcgtgccggaaggaggattcaactcggtagctctgcgcatattgattcagaatataaactccatgattgaaagagaaaatgcttgaaacgctacaacaactcgaccagcaattattgctcacacttaacggaatgcatgctccattctgggataatttcatgtggatcgtttctgccaaaatgacttgggtgcccatgtatgccaccctgctatacattctatgccgcaattttaattggcgggtaagtgtattgaccgtcgttgcaattgcactgaccatcacctatgcagaccagatttgtgcatcagtcatccgtccactggtagaacgtatgcgcccatccaaccccaataatccgatatcggaattcgtacatattctgcacgggaaacgaggaggacgctacggttttccctcttgtcatgcagccaattcattcgccttggcattcatcgtcatgtttctgttcaaacagaaattcatttcgctctttttgctcggttgggctatactgaattcatattcccgtatttatctgggagtgcactatcccagcgatttattggcaggaatggttgtaggcttaagcggtgccgccatcatctacctgctctaccgatattgtgtaaaatgtccctgtgccgaaaaactattacaaatagaagattctgaccgacaccttcttaatcatccacaggaaatccgatatacccgttccacaatatatatgggaactctcactctgctcgcaattgctgtctattcggcaattgcctgacagaacaaactattttccatccttcgatagttccggtttttgaagaaaaattcactcctattttataaacaggacgaacatcagccaaaaacgaacgctcatatcctttctcttcaatttgctgcaaagcatcctctgcggagccatccaatttgaattcaaaaatatagacatattgaggggtttcaacaatacaatccacccgcccctcgctctgcattctctctaaatgcaccgtataaatactcatcagacgaagcaacagatagaaagtatactggaaataatgttccccacgctcgctgtccttacgacgcatcgtataaggaatatctgcaaaaaaagatgtcagcaactgacggaattgctccaattcccccttctttaaagccagccccaaacgggcagcgatattcagttctccctcgttcacctgcaaatagttggctgccatcatcgtcagaaaaccgccctgcacctcactgttcgggaaatcgagcaaaaacatatccaaatctcggtcgtattccttgatggtcagataaccgctctgataaaacatcggcaacggatattccacatccgccttgtagctcataaactcctcctccgtgtaatactttccggtcaactggtctatcccctcatgaaaatgatttaacagacgaatcaaataagtaggtgtccccgttgcaaaccaataattcccgattcgctgactgtccaaggcgttcagcacactgaagggattatatatgtctgtcagccttgtactgaaatggtaaccgtcataacgttgcttcaaacgttctgccatctcctcctcgcagcaaccttccatctcggtcatttcacggataggttctttaaaataacgatgcatttccgcctccgtgatgccacacaacgcatcatatttcgacatcatgctgatatctttgggctggttgaaaccgctgaatacactcacctgcgaaaactttgtgacccccgtcagaaaaacaaaccgaagatattcatcagccaacttgaataccgaataaaaagctttaagcatctcccgattttccgtcaacaccttcggattcatatccaacacatcgagcaatggcttgtcgtactcgtccaccaacaccacagctccgcgtcccgtctgctcggcagcagcctgcaggatacgattaaaacgggaacccaagttggtgtcgactccaggactgatgccgaattccttttcccaatcatgcagatacccatcaatcttcagatgcaaggctcctggaagcgtaaagtcaaccccattaaaatcaaaatgaaacacccgatgcacatgccagtcgtgttccaacgcatcgattttcaagccggcaaacaaatccttcttaccttcgaaataagcccgtaatgtagaaagaagcagactttttccaaaacggcgaggacgactcaaaaaatagacctttccttccgttgcaagcgaatagaccatatcagtcttgtccacatagacaaatccttgccggataatctgctcgaaagtctgaatgccaatagggtatttcatatcatctgcaattaaaaagatactaatgcaaagatagtgatttttcaacggaaaagccagccaagcaaagggatttaatagaaatccttaaaggcatacgaaaccaccaccgttttcactcctgcatccgggtacttgttctggtaatgccgagtcaggtctttgtaaaaacagagcatgtcataggccggcaaaacacttctggttttggagtaatagccaataaacacatcaaatggaggatagtcagttgcatttcccgattcatccaggagcatccattccccaccgcctatcatacgtccatcgggaggcagcagtttgtaggattccggcatttcttccggtttcttgcttgtacttttcacaatatacggaccaaagaaatgatttgcatcctgcagacccatccatttcaagtacccctctccgctatggcatagcatatagtgatactttgtaggaaggagggagttcgccttcaaatcctcttcaatcggtgatttgttttcagcttccacggcatatcggtattcaggaagcggaattctcttgtaataagcgtcaggaatgaagtgtaacggcaagccttccgagtctttctgtaccttggaaatcacttcgagcaggtcacgttcagtccatgcaggggcgcccattgcataatccaggtaggtggtttcgctcaccttaatcttgtattcatagcctttttcgtattcaaagcctgcgatacttccataggcaatccattcgtctgtctgttcttttttaacggcatatagttcagatacaacgctgtttccttccatgatgattcccggaatcttctttgatgctacagtcagcaccagctctttgtaatcagttacctttctaccttcttcatcatcgttgctgcagctgataaaactgaatatacagaaaagcaatacaagtgctcccccaaaaaatcttgttttcatgttactgtatttaaaatgagctctccattctttatattattttgattatcaattatttattatagatatatataaataaatgtatcaatgattattaagaataatgctataatgaggagtatatttttaacctttttgtgctctgatagtaaataagtatttgctatcagagcacaagttatggcaacacgagccattattgattcaatttttatatctttaaaaataatggggacgattgagtatattgaaagaaaaatcaatatggtatcaatgatctgtcttaaaattcttttcatgttgtttccttataagataatatattgatattccaacaacaggaatcaataaaataatcaacgaatataaaattctattcccataagtatattttgagcgtataacattatgcagtacaactacatctaatatacaaatcagaataattaagatatatgttatatccatagtcatctattaaaatatttatcatcacctagcattcttgcaagaacaagcatcgctacttttccatccttcgatagttccggtttttgaagaaaaattcactcctattttataaacagaacgaacatcagtcaaaaacgaacgtgcatatcctttctcttcaatttgctgcaaagcatcctctgcggagccatccaatttgaattcaaaaatatagacatattgaggtgtttcaacaatacaatccacccgcccctcactctgtattcgttctaattgtattgtatagatactcatcagacgaagcaacaaataaaacgtatactgaaaataacgttctttctcacgctcgctgtctttacgacgcatcgtataagggatatctgcaaaaaaagatgtcagtaactgacggaattgctccaattcccccttctttaaagccaaccccaaacgggcagcgatattcagttctccctcgttcacctgcaaatagttggctgccatcatcgtcagaaaaccgccctgcacctcactgttcgggaaatcgagcaaaaacatatccaaatctcggtcgtattccttgatggtcagataaccgctctgataaaacatcggcaacggatattccacatccgccttgtagctcataaactcctcctccgtgtaatactttccggtcaactggtctatcccctcatgaaaatgatttaacagacgaatcaaataagtaggtgtccccgttgcaaaccaataatctcggattttttgattgaaaaaagcattcagcacactgaaaggattatagacatccttcatcccattactgaaatgatatccgtcataacgctgtttcaactgctgacgaatatctgcttcgctacaacattccaaagcagccatctcacggataggatctgcaaacactttatacaactcctcatccgtaataccacacaaggcttcgtatttaggagtcatactgatatccaacggttggttaaaaccactgaatacacttacttgtgaaaatttggtaacacctgccaggaaaacaaaccggagataagcatctgcttgcttaaacactgaataaaaagccttcaaaatttcacgattctgttccaatatttcaggagctttttccaatacatcaagcaaaggcttgtcatattcatccaccaaaaccacagcacctcggcccgtttgctctgcagctacttgaagaatacgactgaaacgcaagccatattcttgtggaacatccgttacaataccgtattccttctcccatcgagaaagaatactatctaaaacccgattcaatgcaccgggtattgtaaaattgacaccgttaaaatcaatatgaaataccggatactgaaaccaatcatgctccaacatttccattttcaacccgctaaacaactctttcttaccttcgaaataagcccgcaatgtagaaagaagcagactttttccaaaacggcgaggacgactcaaaaaatagacctttccttccgttgcaagcgaatagaccatatcggtcttgtccacatagacaaatccttgccggataatctgctcgaaagtctgaatgccaatagggtatttcatatcatctgcaatttaaaagatactaatgcaaagatacaaaattttcaacgaattaggactccttcctttacataaataagctcctgtttcaagaatttcgaggaggtttcaaaggagtgcataacaatacaaatagtttctgagatatagaataaacctatttctcgcccactcaagacacataaatcctatgcttaacttgaatacaaacatatgtcaactataagacaaagataacaagttgttatctttgtcttatagttgtgttatctttgatatatagatgacatatatttgagagggagagaagagggcataaagaaagcgcaatgagggtaaattatcattgcgcctaaaactattttgcatcgatttattgcaaccgaatacccagcacctcttcaaagtgacaacgcatgcggactttcacttcatcaaaatcgaccggatgccccacttctctttcaatggaagtgactcctttgtcaacaaaaccgcacgggttgatgttgctgaaataagtcaggtcggtattgacattcagtgccagtccgtgcatcgtgatactgcgagaacattttactccgatggcacagattttccgggcacgaggcgtgtgactttccaaccatacacccgttgctccttccagacgttcgccggaaattccgtaatcggctatcgtacgaataacaatttcttccagacgatggacatactctttaacgcctatttccaattggtcgaggtctataatgggataggccaccaactgaccgggaccatgataggtaatgtcccctccccgatccactttgatacattctacatgcttttctgccaattgcatctgattgagcagcatgttggcagcattaccgcttttgccaatggtatatacaggcaaatgttccacaaatatcaactgtcctgtaacggtctgtccctgcagttttgcatgaatcaaggtatccagcaattgctcctggtaatcccaggtttcacgatagcctctttgtccaaaatcaacaaattccaccataagacggtcttattatattatttccgaacgacatgacgctctgcatggtagctggaacggaccagcggaccgctttcgacaaatgaaaagcctttttccagaccgattgtcttgtattcctcaaatactttcggacggatgtattctttcacctctatgttttttgctgtcggctgcaaatattgaccgattgtcatgacacgacaaccgatggcccgcaaatcgtccatggtttctaatatttcctcacgtgtctcgcctaaaccgagcataatacctgattttgccacgatgcccgaatcggctatctgtttcaatacttgcaaagaggtatcgtattttgcacggctacgtacactgtcggaaagacggcggacagtctcctgattatgggaaatcacctccggtttggcagcgattacctgtgccaccaattcaggacgaccttgaaaatcaggaatcaatacttccattgtggtattgggattttcacgtttgacggactcaatcaccttcacccaatgagaagcgcccaaatcctctacatcatcacgatcgacggaagtaatcaccacatgcttcaatttaagagccttcaccgattcggcaacatgatccggttctgccggatctagcggagccggatgaccggttgttacattacaaaaccgacacgaacgtgtgcatatattaccgccaatcatgaaagtggcagttccgcatccccagcattcgccttgattgggacagcgtccactggtgcaaattgtatttagttggttgttccggatggtgttcatcacctctacagacaattgtcccatgggcaactgaatcttcaaccattcgggttttcttctgttgtttgtcataataatattgaataaatcccggtaaagttaacacttcttcccataatgcccaagacaaaaaagataaatctagctacaaatgaaaaggaaccgcacaagaatgtgcagttccttttttactaacccttaaaactgtaattgaaatgagtaatttattcccgttttactcttagttgttgtttattattttatcgttgttttcatatagaagatgtacgattccgccaaaggttgcgtcaagccggattattttttgaaaaatatttacaccacgactgaataccgcactccgtacacttgggttttcgggctgtacaaacgtatcgcccatgcagaataaaccaatggtgagctgtggaaagcacggctgccggtatgttttgaaccagttgtttttccgtttccaatggtgtctttgtattgttaaccaaaccgatacgattggtcacccgaaacacatgagtatccaccggcatggcgggacgattgaaagcgacggccataataacattggctgtcttacgtcccactccgggaagcgattgtaacaactccatgtcttcaggcactactccaccgaaatcggcagccagtttcactgccattccgtgcagatttcgggctttgttgttcgggtaggaaatggattttatcagttcgtatatttcctccacacttcccgcagccatggatgcaggatccgggaaacgctcaaaaatagcaggagtcgtcatgttcacccgcttgtcagtacactgcgccgaaaggattactgccaccaataattcataaggattacggtagtgtaattctgtttcggataatcccaagtgctccgaaaaccattccaaaacacctctatatctctctttttgtgtcataatgctaatctgctgttttttccgatgtaaaattacaaaaatcggcagaacaattctaaagaaatcactacttttggactcaatatataaatgctcactaaaactaactgctatggaccaagagacgaaagagacttaccgcccgattgtcattcggaaatatgccgcagtattaaaatcatgccgcaaccttatttcacgggatgatatccggcagatacgaagggcattcgacattgccatcaaaaacgaaaaaagcgctgacgagctcaattacaaggagctgatacgtattctggacatcacattgattatcactcaggaaatcggtctgggacggacttcgattatctgtgccatggtgcataagactgttgaaaaggagatgctgtctttggatgaagtaaaggagatgttcggaaataaagtatggcaaattatcaagggcctgaaagatatcagccatatttatgcaacccagcagattgtggattccgaaaattttcggaaactactgttgagctttgctgaagatatccgtgtacagttgattttcttggccgaaaaactttatgccctccgattggcaaacgatcttccagaagaagaacaactgaagctggcacaggaaaccagttatatttatatcccttttgctcatcgactcggattatataatatcaaatcagaaatggaggatcgtgcattacgttactccaacccgaaaatatacagagaaattgaacaaaagctgaaagattctaaaagtgcacgggaggcttatatagcccaatttgtggcaccgattacagaagagcttgaccgtcggggaattaaatataagatgaaataccgcaccaagactatcgcctcgatactcaacaagatgcggaaaagtcaggtggagtttgaagagatatacgatattttcgccgtccgcttcattatcgatagtaccggtgaaaatgaaaagcccgactgctggagagtgtattctatcgtaacggataaatatactccgaatccacagcgtttacgcgactggatttccgttccgaaatccaacggatacgaatcattgcagacaacggtgctcggtccggacaatcgttgggtggaagtgcaaatccgcacagaacgtatggacgagattgcagaaaaaggatttgctgcccactggaaatataaaggaggaacgtcagattccattattgaaggctggctgaacgagttgcgcgaaattctggaaagcaaccaggagaatgccatcgaactgctggatgatatgaaaatcaaccttcaggataaggaagtccatgtattcaccccaaaaggtgacctgaagacgttgcaggccggagcctccttgcttgactttgcttattctatacactctaacgtcggcaacaaatgcatcggcggtattgtaaacggaaaaaatgaaacattacgctatgttctgaaaaacggtgaccagatctccattctgacggctaccaaccaacagcccaaggccgactggctgaattttgccatcacgtcaaaggcccgtaaccggattcgccagtttttgaatgaagaaatcaaccaccaggccgatatcggtaaagagaccttaatccgacgactgaaaaactggaaaatagaatttacggacgagataatccgtaaactgatgcaacattataaatacaagtttgcattggacctctaccacggcatagccatcgggaaacatgagccctctgaaatcaaggagattctgacgcatgccgaagaaaaaaccgtggtagcaccgcccccaaaagatgtcaaagtggttcatccgaagaaaatggacgaggatgttttgctgattgacaagaacgtggacaatgtagactataaattcgcacgttgctgcaatccggtctatggagatgatatcatcggttttgtatctatcggagagggcatcaaggtacaccgccgccaatgtaaaaatgccatcgaactgatgcgccggtatccctatcgcattgtaaacactcaatggaccaacgacggggcaacctcctatcagaccgtattaaacctgatgggtaaagacgaagccggcattgtcactaaaatcacggaaatcatcggcaaggacccgcacgccgctttacggggaatttccatcaactcggcagaaggaatctttgacggaaatattgtagtgctgattgacaatacagaacacctggaacagcttatctccagattgaaacacatcaacggagtgatgaaagtgaacagacacgattcaatgttagaataattgctttctttgaaagcaattattttttaactttgcattaccttttatattataaacttacgataatgaataaacatagtattcttgttttacttctggccgggactctaagctcacaggctcagaatgttaaagaatggcttgcattgccgcccataccggtggaaaagccggcattaagcaatatgaaaaatgtaaacgagcgtatttttaccgatgccatgctaggggatttttcaggattgaatgttcaaaatctgacacctgataacgggaaatacgaaggcaaactaaaatgggacattgcccgaatggaacaagacactgtcgtaacaactacaagcggagaagcccttacactgaattattacgccacgtatatcagcaatccggaatggatgagcggccaactgactttccgtattttcgggaatgcagaaatatatgtggatggagttaaaaaagcgacagcaaacggagctaactgctctgtcaggacagtgcctgttgaatggctgcccgggaaacatctgattgtagtcaaatcgctaaccaaaggaggcaaagtggtgtatgcccattttgaagcagacaaagaatttgccaatgaaccggttgttttttctgtttcacccaaacgcggaaaagctattctcgatgtattgaacggacagcgtatttcccgtctagatgtgtcgccatccggtcaatatgtattgttgggcagaacaaacattgtcaatgggaaatcaacagtcaacacttatatctaccgcattgccgataaagaaatcatgtacactttccacggtaatagcgcaaacaatctgcaatggattcccggcagagacgccctttcctatatgcaaaacgaaggcggcagcatgtctctctacgaatatgatctcgaaacacgcaaacaaaaatgtctgctaagtgaagataaagctatcagaaactatatttggtcgcccgattgctcttacttgatttacaccgtgcacgagagttttgccgatcccaaatgggaattgcgtaaactggccggcgtccaagaccgacaggattatttccgcaaccgcagttatttatgtaaatatgattttgcaaccggtctgcactcacgccttacctggggaaatctttctacagcactgatggatatcagccgggacggcaagaaattattgttttctacatcccgccccgtatacaacgaatttccattcaacaaacagaatgtctatttgatggatatggtaacccaacaggtggatactttatggaaagaccgcatctggtctgtaagttgcagtttctctccggacgggaaacagctattggtacaaggaggtccttccagtttcggaaaattaggagaaaatattacaaaaggacagattgtaaaccaatatgacacccaactgtttatctatgaccttgccagcggtgatgttcaagcaatcacacgcaatttcaatccttctgtagaagaagcggtatggcataaaaacggtagtatcattgccaaagtcaacgatgccgactttgttcgcctttaccgttatgacggcaaagaatttgtacgcatagaatgtccgggagatatggtaaaacaaaccagtcttgccgaaaattcagaatttatgatgtacacagcctctacaaccaatcatcctgaccgagcctatacacttaacttaaacgataaccaatttgccatgtgggacaatccctgtcacaagcaatacgagaacatcgaattcggcgaaatgaaagattgggattatcaatacaaaaaaggaactttgattgacggacgttattacctgccggcagattttgaccccaataaaaagtatcctctgattgtttactattatggaggtacgactcccgtcagcagatctttcggcggtcgttggccattcaatttatatacagccaacggatatgtagtatacgtattgcagccttccggcaccatcggttacggacaagaattttctgcccgccaccaaaataactggtgtaaaatcactgcagatgaaattatcagttccgtacgtgccttcatcaaagcccacccttttattgacggggaacatgtaggctgtatgggagcatcttatggtggattcacaacggagtatctcaccacacaaacagacctttttgcctgtgcaatttcacatgcaggtatatcatccatctccagttattggggcgaaggttattggggatacggatacagcatcaatgcttcggcacactcctatccttggaaccgaaaagacatctatgtggaccagagcccactgttcaatgccgaccaagtgaaagtccccatcctactgattcacggaacagctgacgtaaatgtaccaacaggcgaaagcatccagttctacactgcactcaaactgcttggcaaagatgcagagctggtgttggtaaaaaatgccgaccatgctgtagtagattacaatcaacgcattttgtggaataatacgatactcgcctattttgccaaatacctgaaaggtaaaccggcttggtgggaacatcaatacaaagacttaaatctataagaaataataatcaacaattaaccaataaatgaaagatatgaatacgattaccaacagagcagcggataacatccgaatactggcagcagccatggtagagaaggcaaaatcgggacatcccggaggagcaatgggtggagctgactatgtaaatgtactgttctcagagtttttgaactttgatcccgacgatgcagcctgggcaaaccgcgaccgttttttccttgacccgggacacatgtctccgatgttatacggaatgctgagtctgattggcaaattctcaatggaagaccttaaaaacttccgtcaatggggaagtgtaactcccggtcacccggaacgtgacgtacagcgtggtatcgaaaacacctctgggcctctgggacaagggcatgctatggctgtcggagcagctatcgctgaacgttttctagtagcacgctttggagaatggatggctcacaaaacatacgctttcatttctgacggcggtattcaagaagaaatatctcaaggagcaggacgaatcgccggaactctgggactttccaacctgattatgttctatgatgcaaacaatgtacagttgtctaccacagtagaagaggtgacaacagaaaacactgctgcaaaatatgaagcatggggatggcgcgttattaccatcaatggtaatgatgcagaagaaatccgtcaggctctacgtgcagcaaatgcagaaacagaacgtccgactttgattatcggccgcaccttgatgggtaaaggtgctgtaggtgccaataacgaggattattcaaataaagtatctactcatggtcagcctttgagtgcagccggagcttctatcgaaaaaacaattgaaaacttgggcggagatgcacaaaatcctttcactatattccctgatgtacaggaatattatgcaaaagtattggatgaaaaacgcgcttatgcacgccgcaaaaaagaagaacaagcagcttgggagaaagctaatcctgaattggcagtccgcttccaccaatacatgtcaggggaagctcctgcaatagactacaaggcaatcgctcacaaagctaatattgcaacccgcgccgcatctgctgacgttttggtagaattggcaaaacaagtagacaatatgattgtaagctcggcagacttgtcgaactcagacaagactgacggctttataaaaggtggtgcccgtaatctggtgaaaggtgatttcagcggaaaattcttacaggccggtgttgccgaattaacaatggctgtactttgtaacggtatagcactccatggcggaatccatgtagcttgcggaacattctttgtgttctccgactatatgaaaccggcattccgtctgtctgctttgatggaagttcctgtaaaatatatttggtcgcatgatgctttccgagttggagaagatggtcctacccaccaacctatcgaacatgaggcacaattacgtctgatggaaaaattacagaaccaccatggtgaaatgagccttatggcattgcgtcctgcagacgctgcagaagctaccgtagcatggaaaatggcaatggaaaacacaaaaaccccgacagctttggttctttcacgtcaaaatattaatgacattccgtcaacttccggcgaccgttacaatgacgccctgcaggcagaacgcggagcttatatagcaatgaagaacggcgaaaatccggacgttgtattaatcgcttccggttctgaagtctctacgcttattgatgcagcaaatctgttgaaagaacgcaaaggtatcacttcacaagttgtatcagccatttctgaaggtttattccgcaaacagccagcagcttaccaggaagaagttattccggtagctaagaaaaaattcggcttgacagcaggattgtctgtcactttggaaggactggttggcgccaacggacgtatacatggagtcaatcattttggttactcagctccagcaaaggttttggatgaaaaattcggttttaccggagaattcgtttacaatgaaatctgtgaaatgctgaaataaaatagagtccggctattggccggactctatactaaataaaaaacagcgtattataacgctgttttttattttatacaaatccaattctttttctttccttcataattcctgccacaaattgttcggtaaacatccctacatcctgtttctgtacagaaataatctcagacgttttaacctttttacccgctttggcaacacgttgtaaacagtttcgaacaatcatatcagccacaatcctcatcaatcgagaactggcatgactgcgttcttcagaagatattagcgaaccgataaattctgtcatatattgacgggctgtaactgtcattttcatattctctttcatcaaacgacgtttcagaattaccatcaattcctcccgggtataatcttcaaatgtcaaaacatttactacctcagaaatttgctcagcatccccattcaaaccaaccacacgattgcgtggctcggcataaataataatatgagaacccggacgtatagccatctgattcatcaatatagcccgcacccgctcacgaaatcctacagcttcatttaatttaggagaatcctcatcaaacaacaatataccaccttcagaacgagctaaagcctcgccaatactattctgagcctcattttccatcaaaccaatcatacgctcaaccttgaaggtaaatacatttcctgtagatatgatacccatagctttgtaaagacgagctataatccgtgcaacggtgcctttacccattgccgagtttcctgtaaaacaccattgaagagacattttactactcaacttcaagccttcacggctatagtgacgagccaattcgacaaaatctccaatctgcttctttaaagaagattggcctaccaactgctccaattcagccaatgcctcatgaatctctttttcatcgaatacatctgtattcaatttgggcaagttgaaaatatccgccggcacatcttcccgacgaatagtagtcaattcctgtcttgtcaattcacgatcccgacgaatagtcatcgtacgatcagacatattacggatcgcaagttcaacaatcttttcaactaataaaacattaccaaaattcttattacgattctcataagctttacttatcaattcgaaaaatgcagctttagctttcggatgaaaactgtaattcttttccttcaatttattctcagctatctttaataattcgtccggagtataatccgtaaaattgaagcgatatgggaaaaactctgtcaatccaggataagtcttcaataacatatccactttgtccggataacaacctaacacaacaatcagattgtcacattcttctgttgaaagattacccaacaacatttccaaaaccacttttccgtattcactctgtagcaaaatatccgcctgactaatataaagaatacctcccatagacatatcagccagcgcttccgcaacttgtacgggttgcattccagtatcggccgataaatttcttccatcttgaatcacgacattcggacgcgtcagtacaccaactgcctggtaaatctctcccatcattttaacaacagttgtttttcccgtaccaggattaccactaaaaatcatattcaatggaggcaatacatctgcaaaaccatgtttctgacgctcgcgaataaaataaacatagttcagatgttgcgcaatgctctgctttagttcacccaaaccaaccatagcatttaatttctccattgatttatcaggatctccagcttccggcaaaacgatgtcctcagcctctatcaacatcaattcttctttactataatcaccttgattctgcgacatcaaacgcctcgccatctgtcgggctgcctcctccaatttttcatctatataatgaccgttctcaaaatcctcctctttatcaatacaagccatctgcagttgtttgttaaacttctcttcggctgccggagtaaaacgatactgtaactttctaagtttgttgcgagtaatatccattaattcatcggaagtataattttcaaagtacaaatgctttgtaaatacctttttcaaatcaggcaacatactcaataaataattcatctcatcttccccatcctccaatataaccagaacatcgggtttctcatgtaataaaatggaatgcaatacacccaaagcaacaactcccctatcctcctcttcccccatatgaaacaagtctccagcctcttcaatatacaaaattcccccccgacttgtctgcaaggctcgacgcactaactgctcttcaacagcagctccttcctgtacaaaatcccgacgtttaaaatgatgcactttaccattcgataacaatcccaatactttaaacaattcacccagcatatttgccactgtactttttcccattccggaattaccagcaaagataagatgcattggagaaagccgagcttcaaaaccgtgttctttacgcaaacgtataaattcagcatattcgacaatacgcgttatctcttcttttactctcctcaaccctaccatgcggtatagtctatccattatttcgtccctatcttcctgagaatagttattcaaaacgtcctgtgcttcttgagcacgaccattttctacagtcagttcttgaacaaaatcataaggaacatcttgcttaccaataataaaaggcatattcaaaatcacttttcccaaaaaagatacaatcatcgtgtattcaccctcttctgacaacccttctgcattccccatatctattccaaagcataataaggcattgtcatgcccctcctgatctttcatgaaatgggcagcttttgctgtctgcatggactttaggataccattttgccctaccacccgaattacaaattcgtatatccattccttttgcaatagattttgtgccataaacaagaaacggacgctttttaaatcctgactatccaacactctgaatgaatgaggacgtttacttgcagtctcatcagtctcttcgcaaactcggtctatcgccacatacattgggcgaaaatacttatctgactcaccacttccctctatgatataaatatcatcagattgtccagcctcaccaccgatctcaacatacaaccgatagacaccttcttgccatgctccgtccttcaaatcctgagcggtcagaatttcctcgtatgcaacttgagtatcatctgtttccaattccatagaaccgtttttttcagctatacataccgctttttctccttccaaacggaataaatgcacagaaatattgcatttctgattatcccctccacaatgctgattaaacacttctgtatctacatacaattcttttatctctcccactgcatataccgtacgataatccctatctccacgataatcctgcccagggtcaacactcgcccgtacacgaccaacaatccacccaggtaattctgcctgtccgtcttttactgcagtaacgctatttgcttccatcgaaagtaggtttaagtaagtttctttcaaaattagatatttatgtgacaaatgcaaatattataccacgaattaatttcgcccctttctcccttctacagcatatataaaaataaaagcgtgtagtgatatcaccacacgctccgtatactaagagaaactatttcgtcttgatttaagaacgacgtcctctataataaacagcttccttcaactgttcaagtttctcattcaatgcagtatcttcccgattacacatcacccataaacggcagccatctccatcagctctatacgcaggctgcagatactctttctcatagactgtatagccatttctttcataatagcgaacacgtcgggtagcaatatctgtttctgccggctcggcctccaatatgcgtaatccgtccagattctctttcatccaatccaatgtttgctggcctattttagcattccgcatttcagcatagatcgccaaatgctccaaataataaaaagtgccgaaatcccaatatacaaacaaaccagccaacttaccatcacattgtacggcattaaaagacattctcggttcatctatcagcattttcttcaattgctccacatcacgtcgttcctccaatgggaatgcttctgtgtaaagttgcatcaacttaccaaactcttcatcatttgcatttgtaatttttcttaatgtaaccataacatttccatttaaattattcaacacttaattattctctatcccaggcattctctctttgctatttgccaaaatcacaacagatacagccaacaatataatggccatgcccataaattgccaaaatcccaattgctcttcaaataccaaaacacccatcgctaccgccgtcatcggctccatacatcccaagacggctgttgttgtagatccaacatgttgcacagccaacaccaaagtaaaatcagaaaccagtgtcggtatcaaagccaataagaacaaatgaatccatgtatccatatcaggagctaattcaagaggctgaccttttattaataaattcaatccaaaaacaattgcacctacaaacaaaacataaaaagtcaattttaaaccatccattttagacacattggatttgtttacgcctacaatatacaaagcataagtaatcactgttgtcaatactagcattaatcccttcaagctaactgtaccttcagaaccactataactcagcagatataccccagaaatcgccattgcaatagctatcaataacggaagagatactctatctttaaaaaacaaaatcatcactaatgtcacaaccacagggtacaaaaagtgaatcgttgtcgctatgccactcggtatatataaatatgaagtagtcaacaacaaagcagtcaacgaataaaataatcccagaccagccaaaacacccaattcgcgtaaagtaaccttcaaatcatgccgtcgaatcaacaaccacacacccagcaccagagctgacattccaaacctgtaaaacatcacagagtctacaccaacacccttctgaattaccggcaaggcaaacagaggtatcaatccaaatgttgatgaagaaatcacaccatacactaatcctttgattcgattcataaacttttaaattaatatgttattacttattatcagcgcaaagataagcacaaaacgtactctgaaaaatttttttcacaaaaaggcgaattttcttgtcaaaatatttggagatataaaaaagatgccatacatttgcactcgcaatacagaggtattgacagagattgcggggtggagcagtggtagctcgttgggctcataacccaaaggtcgttcgttcgagtcgggcccccgctacaaaacaaaagactagctataaagctagtcttttttattctctcaacttttcggataaaaatccacaaagaaaaataaaacaatatcacaaacgggtacgcaatggtatcacaacataccttcaaaaagaaaaaagccataaatcactttaaatgttaacatcagaagtttagttaactaaaagaaaaaagggaaacttcagttgaagtttccctttcgtgatccaggcgggattcgaacccacgacctacggcttagaaggccgttgctctatccagctgagctactggaccaacactcatttttacggtttggcggtgcaaagatacgctttttataatacactccaaacaaaataagacttttttcttcatcaagatttcttttttagcataataccactaataacaaaaggaattatgacaaagaatgccgttccaacagttaccaaacctgtgtagaaagccggactgccaacaggtaattgggatggcgggaaaaaagtgactatgaaagaaaaaaccaccgccaaaaaaccaacacctgcgacaatccacattccagctttaccaccggggaccttatatcctctgggcagatcaggttgtgtatagcgtaatttaatgccagccaaatacatcatcatatacatcactaaataaacaccaattgtcaaagcagtcagcaaaaagaatgcaacactgacatctttcataacaatatacaatgatgacaaaacagtcactatagcaccctgtaataataatatattaatctgcactccattattattagttttcttcataaaatcaggtaacaacccttctttggcagtccataaaagacctcgactcggacctgaaatccatgacataacacctgctaaagcaccaaatgctgtcagtaatcccattacattagtcaaccaactcacattgtaatgcgcaaacacatcatgaaaggtttccaatacaccagactgcagattaattgttttatacggagcaacaatagctaccgccaacgaaccaaaagtaaataaaacaaatgaaattaaagcagccaataacatagcagccggaaattgacgctgaggatttttcaattcctgcgcatgcacggcatgaacttctacacctgcaaataataaaagaataccggccaaaaatgctatatcactcattcccgtcatgtgaggaaaaaaacgaggatgcgcatgtccagcttctacattgacaatctgggatactgtgtcaggaatatgctcaaaagaaacaggattacctcccattacccatactaatgccacaataatgataatgacacccggcaaaacagtacctatcaaaaatccttgactggtaatctttgaaataaaagacgtacccataaaagtaagaagggtggccaaccaatacatcacaatggcaaatactccaacatatacaccatcttgtgatagttctggttttccgaccatgtatgcaatacaggcagcagcaaaccctaaaacagtaggataccatacaacattttgaatccactgaagaaaaatcgccgtaaatcccatccgcttattaaatgcttccttcacccaagtgtatacaccaccaccttcagcagcaaaagcactacctaattcagcagccacaagagcagcagggattaaaaacaggaaagtagcaaaaccaatgtaaaaaaacatggtcatctcctcttgtgccatcataggcagaccgcgaaggctgataacagccgccgcggtcataagggctaattgccccgttgtgatattcttcacgatcttattcatggttaaaaaatttagaactaacttccctaataacgaagttacacttaagatgtttccattttaatcacgaatccatctacattccaatttatttaaccatcgcctacacttgttaggctgtctatgttttttttatctggttcccaatacgcgcatatattctgctatagctactttatactggtaattcacagaaacaacattcgtatacgcttgcaaccaactagcctgagcagaaagcacatccaatatcggaagtttcccttcattatagctgaatgtattcaaatccaaattatcttcagctatctccaatgaagaacgaacaatttccaatcgattggcagtctctgtcatattcacccaagctttactaagctctttatttacctgatcacgcaactgagtacgttccaattccctaacctcttcttgagaacgtcctttctgcacctctttacgcatttttccccaatgaaaaacaggaatattcacctgtgcataagccgtagtagcccatttccgatctccatttacattcagcaactgggttccgtacttttctttcactcctacaactatttgcggtaagaattctgaacgagccatacgtgtctgcatttttgcaacttcaacattcttcactgcaacctgataatctgctcgtttttccaaggctttatccaattcttgttcttgaggctgttgcaatgtgtgtcgaatggtatctgacaaaaacacttctctgtcaggatctgctcccaccataatattaagagattgtaatgcaatacgataatttgtcatcgcagtattttgctgcaattctgcctccttcaaacggttttgcaccattaaaagatctgtccggctaattgcaccctcttcaaaacgcttgtttacgattccatacaattcattaatcaacactacatattcttctgcaattcttaataaattttgatttgcaaccaatgtccaataacatacatctgccgcataaacaatattatccgttgtatgttctaccgctaactgtgcaatagcatattgcaattttgccacttcatgctgtttacgcacagctcctcctgtgtatatctgctgaacaattccagcttccacaccataattatcgtgtttcaatggtgttcctggcaaaaaatctatttcttcaaattgccaggaatagtttcctgaaacatctactcgcgggaaaaaaccagttttgatacttttcaatgaataaagagcaccttcagcagattgttgagctttctgcaaatcctggttatactccaaaacttgcgttctatattcctctaaagacaaactctgtgcaaatgcaccaccaacaagtatcgttccaataaaaattaatatccattttttcatattcttcatctttattcgttcatggtctgccgctcagtattttttattttaaatagcaaactgtatgttacaggcaacacaaaaatggtcaacaaacttgccaccagcaatccgcccattatacaagcagccataccaccaaacatagcatcgaacaacaacggcaacataccgagaattgttgtacccgaagccatagcaacaggaacaattctagatttagtagcctctacaatagcatccaatcgcggcaatccacgctgctcctcgattccgatttggtctatcaacacaatcgcattttttatattcatacccacaagtcccaatacacccaacaaagcaaaaaagtcaaacatcttgcctgttaccaccagaccaaacacaacaccgataaatatcaatggtaccatcaacaagataataaccggtttacgataagtatggaataagaaaagcaatacaataaacatcagaataaatgtcaaaggcatattagcaccaatagcagcattagattctgtttgggattcattttctccaaaaatctgcatccgatagccttgaggcaatacaatttccttttccaaagcttttttcacctgagcgtatgccgccatcgtatttgctccacgtttggaatcacattgtgccatcatcactttttcacggttatagcgcttaatcacattataattgtaagcaaaagcgaagctatccaccacttgagccaacggcaccggataaccagattgtgagaacaccggcaaagtcttcatattgtcaatatcagatgtcgaaatattctcttctttcaacaatatcggcataaataaatctttttctctaaactcacccaaagccaagccattcgttgctatttttaacgaataggctacagattgacgagatattcccaaacgctgaccacgctcctgagagtaggctggttcccaaaccggaactttatttccccagctatttttcacatctgttaccatatcgcacttgcgcataatagccattgcttgttctgttaatctagccagcgtatcaatatttgcaccaataaaaccaaattcaatattagcttccactgctggagacaacttaaataacgatgaacgaattaaaatatcggggaaattaatacggacatactcattcaaacgagcttcaacatctgctgtgtatttcttatcgctaagttcaaccaacaaattgccaaaattaggtttagggccaaaagaagtacttgccaaatagtaacgcaaaggagaacttccataagtagcagaaacgctcactacctctttttgttgcagcaagaaatcctcgattttacccatttctttttctgtctcacgaatactatagccttccggcaagaaacaatcagcacggaaataaggcttatccatactcgggaagaaattttgcggcagcaatcccatcacaaccatagataacatgaataatccaatcataatcaacagcgttgttttcttgaaacgaatcaaaaagcgcaacatgttttcaaatttatgatagaatggtttatcataaggatcctttacaatatctccagtactatcttttaaaataaactctccaaaggtcgttgtctgagtcaatgccaaaacccaactcaaaagaagggaaacagccaacacgataaacaatggttttaccatttctgccacagacgaagccgccaaatacaaaggcaagaaagaaaaaacagcaatcaatgtagcacccaacaatccccattgaggtgttgtagctccatctatcaaagcctgacgacgccggatacccctgcttacagaaatctgtgcattatcggttaccacaatggcattgtccaccaacatacccatagcaataataaaagcagccaaagaagtacgattcagaccaacacccataaactgcataatcaataacgtacctccaatacagaaaatcaatgaactacctatcagtaaccctgctctcactcccattaccaacaaaatgataaaaatcacaatcgcaactgattccaccaagttcaagataaagccattatttgcttctctagcaatttggtcttcgggataaagagtcaccatctctatacctacaggcatctgttcttccaactgaaccaaacgggcacgaacagactctccagctttcaccacatcataatcagatgcagtcgaaacaccgacacctatagcccgcttaccattgacgcgcatcaaagttcctggcggttccagataccctttctcgacatcagcaatatctcctaagcgaacttgttttcctgattctgttacaatcaattgattacgaatatcagtcaaatttttataggtacctgttgccaaaattctcaactgcattttccctgcctttttctctccagtattcaccaactcattctgcgaacgtattgtttgcatcaaagtattcaaattgattcctgaattagccaatttagacatggaaataaaaacattcaccacttcagtctgctcaccaaaaagagctactttttgaacaccttctattgtcaccaactcagtcttcaaacgctgtccccaatctcgaagatcgtgccatgaaaatccgtcatcagcagtcagagcaaaataaattccaaatacatcaccaaagtcatccgacaccttgattgccgatgcaccttgcggtaactgagcctgaacattcaaaaccttacgtctcagttcatcccacatctgaggcatttcttctggcggagttgcaggatccaattcgattgtaattttagacattccatagtaggaatcagacttcaacttgtacaccctacgcatggattgtatttcacgctcaaccggttctgtaatcaattgttccacttctttaggagaagctcccggatattgtgtaatcaaaaccgctgtcttaatgacaaacggagaatcctctttctttcccagcgaaccaaatgccattacaccaccaatcaacatcaccgccaagaaaaaataaatcacttttggataatccaatgaatatttagctaaattcatctcttcccccttttcaattttccactaacgacactttttgtcctgcagttatataattcactccggccacaacaatcacgtcatcagcatccaatcctgacatgacctcaacataatctgttccaaatacctgacctacttttaccggctgacgctctacagccccctgtgttgcacgatacaaccacacagaagtctctcctgtatccggatctttaaagattgcactcataggaaccgcaaaaccttctccaaaactattatctatattcaaacgcactctacatgaaaaaccaggataaatattcatgcgatcgcgagcaaaagcagtatccactatagccaaacgtaccggaataccgcttccgtctggagaagcatctacaaattctttaactttagccttaaaccattgtcctttataagtatcaaactctacttctacctgcattttttcacgagtcaaacggacattaatttcaggcaatataaatcctacttccagtttatccggattcaccaatttaataatcgattctcctggctgcaccttctgatagttctcaacataacgagtttccacaaatccatcaaagggagccactaattttgtatctttcaaagtattacttgatgtctcgtaagccgattgtgcccgaatataatcagcttctgctatttcatactcttgacgggaaatagcctgcatcgccaacaaacgcttattgcgctccaactgcgatttagcagttaaccatgcagctttatttgcctcattctgcaaattataatccaaaggatcaacagctgcaatcacactaccttttttcaccttttgtccctcctgcacattcatttcaataagcggacccgatactttaaaagccaacttactgtactcttctgcttcaacaacaccggtatacactttctgcatacgcccaaaagattccaccttcatcactcgtaccggacgagggatgttctgataatcagcttgcttactcttacaagcatttactgtcactacgcctaaaccgagaatgacaatccattttaacttcatataactactatttaatgtatattttcatttatgcacagacaaatacgtcaatactttttttaagtttctaaactatcacattaaaaataacacgccgatatacatctattcttcctgtacaatcataccaaaatataaaaatatcaaaaactgttccattattcacaaatagccctcttttgtgaacattttttttcaatattacaattaacaaatcttcaacaaattgcatatcaaacagattatcaacgagaatattttttaatacacacataatatttatgctaatattttttagtctcgtacaattatttctatttatcaaagcatgcaatgtgatatttttcaactttgtgtgaaattaattcaaatcgcaaatacgcaaaaatgtcaataacaaacgaaagggattaacctgtatttctatcaaagttaatcccttttatttgaataatataccattaattctttctatctatttttgcccttcattcttctttatattacgactttctgccggcaaaacaagattaagcaccactcccaacaaagctgccaaccctataccggacatagaaaaagacccaaaactcaaaatagcaccaccgattccaactgttaaaatcaaagaaacaattatcatattgcgagtgttagtcagatcaatacgagcctgtatcatattactaatacccgcacatgcaatcgtaccaaacagcagaagcataattcctcccaaaacagaagacggtatagatttcaacaaagcattcaccttaccaaccacagagaacaaaatagccgcaattgctgctatacgtatcacccggggatcagatatcttcgtcaacgaaatcgctcccgtaacctctgaataggttgtaacaggaggtccccctacaattcccgcaaacaaacaagccaatccatctcctaacattgtacgatgcaaaccgggatctttcacaaaattttcacctgtcactgcatttactgtataaatatcccctatatgctctataaccggggctatagcaacaggcaccataaacaataccgctctccaggaaaattcaggagtcacaaattgcggccatccaaaccatggtgcacctgctatcagctgccaatccaccttgcccgtcaagccggctacaacataaccaaccataatacctgaaaaaatagggatcaacttccacaaccctttagctcgcaaagaaaccaatacggcagtaagtaaagaacacaaagccaacaaccaattctcctttgccatattcactcccgtaccagccaacgacagaccgattaaaacaataaccggtcctattacaatgggtgggaaaagtcgctcaatcaaactaatccctctccattttatcagccaactcataaaaaaataaactcctgcaacagcaaccaatccacaaagagttcctggcatcccatacaaccgagttgattcaagaattggcgcaataaatgcaaaactactccctaaaaaaatcggtactttaccacaagtcacccaatgaaaaataagagtgcctattccagcagtaaacaaagctaccgcaggatcaagcccaaccaataagggaactaacacggttgctccaaatgctacaaataaaaactgcacaccgacaaccccctgttgaaaaggagataactgatttgtcttcatatctgtcatttaatcaaaattctatattatttcatttgacaaaaataaaacgtagccaaggtacaaaaccaatccgctacgttttatcttatctgctacttttttatcatactacttcaacaagccactgtcccgcagcttaattcgtgtcaaaactttctttgtatataatggaaaatcactcttcatcacccaatcataataacccggttgttctttcaatacctttgccacagacatccctttattctttccaaaattaaaaacctcttcctccttatcattaataacaataaaaccggcaaaatccacgtttcgattttgagttgaaaatttactcaaaaactctatattattttctaatttatcgccataacgatccaactgagccttcaacacttcataagtagccaaagtatcggcagctgccgtatgtgcatcctctaaatttttatcacaataaaatctatatgcggcagataaagtgcgctgctccattttatgaaaaattgtctgcacatcaacaaatttcctacgactcatatcaaaatcgacatcagccctcaagaactcctcagccaacaaaggaatatcaaaacggttagaattatatccgcccaaatcacacccttcaatataatgagccaactctttggctattgccttgaactgtgggcaatccttcacatcatcatcatagatgccatgcacattagacgcctcttccggtatatgcatacccggatttacacgaattgtccgctgctcttctttcccatttggaaaaactttcaacacagagatctcaacaatccgatcttttgcaatattgataccggttgtctccaaatcaaagaaaacaatcgaatttgccaagttcaatttcataatcaactatactttctaaaccatcattggcattaacaacatcaacaaatcctcatcattatccttattttcataagaaaggaataatcccggacgagtaggatcagacaattccaaaacaacatcatcagatgtaatattagataaaatttccaacacaaaaggagatttaaacccgatagctatattttcgccctgatattgacaagccaatgtttcatgtccggacatagcataatcagaatcttgtgcagaaataacaagtttgtcttcagaaacatcaaacttcaccaaattgcttgtctgatttgccattacagatacacgacgcaatgaattataaaattcttttttctcaattacaatcttcttcggattattctgaggaataacagcattataattcgggaaacgtccttccacaagcgtgcatgtcatcttataatcaccaaactcaaaacgagccatcttgtctccgacagccaattttaaatccgaatcatctttcgggagaatatttttcaacatcaaagccggttttttaggcaaaatcaaagaaaactgtccacactcactctttgcatcaaaacgtttataacgcactaatttgtgagcatccgaagcgacgaatgtaaagttatcttcattcatctctatcaagatacaattcataaccggacgtaaatcatcattcgccgtagcaaaaatggtttttaaaataccatccagcatcaacccacatttagttgaaaaaacagctttattatcattcaaagcagattgtatcggataatcttctgcattttctcccataacagaaaattctcctttttcagaaataattttcacctcattgcttgctgtattaatatcgaatgacaggggttgttccggaaattccttcaacatatccaacaatatttttgccggaatagtgatttttccttcttcttccatactatccagctcaattctggcctccatagtcgtctccttatcagaagcagtagcaaacaacgctccttcagaagctaccaatagaatattatccaaaataggctgcaccggtttacctccgattaccttactcaccgcctgcaaacgagtcagcagtgtattgcttgaaacaacaaacttcataggttcaatattttaaataatcaatactatctcatcatagaaacgcctaaattaatagtttttcatttgaatgaaaaataaagcaataaaaaaatgtcgtgcgaataaatcgcacgacatctaaacaatcgaatttaatagcgattattatttccttctttcacgatacacaacatccttcaccttagcaaacccgtcatactctttcaacttagttacagaatgagatgaacggtcaattttataaaatccgacctttcctccattaacacctgatgcaccattatcatacgaaccaacaatcagatgatattgttttgccaaaaactcttctgaattatcagacaatttatctaaatcaggattttgatacaaattaaattttagcatagtaacctcttcttgctctcctaattttacatcatctaaaggataatttgtatttgttcccaaatcataaagataaaccttgtttttcactgcataaaacataaaaggatattgcgaatggaaggcaaattttgtagcctgtttaaattcacttgcttgaatatcatcataataagcttcttgtttaaatccatctccacccatatttataccacatacacatctatttccaccatcatcttgcaatacagcataagcaagccctccagagaatcgcgtactttccatatgtaccaactttttacctgtaataaaactaaataatttgttttcaggatcttctaaaggtgtcaatatttgacgtccatccgaattttctacataagcccatccgacaaaacgttcattatcgacatcataaaacaatgcagtactaccattaccaggacgtgccatactgacagcaacaaaaggtgccaccttataagtaggcttttcacctcttattggggtgtttatcggcaattcaaaagcggcacctgaaacaaattctgttttcgcataagcatctccttctgatgtcacacaaaaccaaaaatcattattaatagcactacctgtatttacagcagtaaacactactggattatccttgggaggtataataaaatttaagtttttaatattccacgattcatcagtctcaaaggttgaattgtttattatatatgaaccggtttctgcaaaaacataaatagcatcccctccggcatataaagtcggcagaaaacctatctgagttgcattcgtcccttccggtaaacctaaatcagccaaaatatcatgaaccggagtaattctatctgcagaaatccttgaaatcatatcaaaacgcactcgattatctttcccttcattacacaataccatccaaccttcaaatgtcggagaggtaatcttcacatcaaaagttttataagtctctagttgtgttcttaaatctttaacaataaaccaacccacataactattggaagggaatgttgccaatgtatccaaatacatactaccattaggattcaataaaacccacggctcatttttatcctgattcaatgaaccggatttcaaatcaaaccgataaataaactcataattaggattaccatccttaatttctccttctatagttgaagtaactttgggtctaacaacaattctatctgcattggataacacttctattacttctggaatattatctattacaacatcacccatttcatgataatcataatttcccttatcttcaaagcatgaccacaataacggcatacctagaagaacaatatacttgtataacttcataactcttttatttttcatattttgaataatctactgcatactttggagccaattgcatatacgagccatcaacatccttaatcggagtatcggcatctgccatttcctgcaaatgacgacgcatagccttagctgcaaaatcaaaacgcccaaaagacactttagaaccagtgcctcctgcattattccaatccctgacagtccaacccattacaccattcaatacctgatattttttcggtgtccatggaccaaaaaaatcatcaccaaaaaattcccaataaaaaggcatattatgttgctcattaaaaacaatggtatatttcaatgcattcaaagtatctgcagaagcagcccaattacttgaagccttataagattgtataagcaacttaaaatgctcgttttcttccaaacgaaacacaatgcgtttagattttaccaataactcatcagaacgcataagaatcactggcattcgcacaccatcagcatttgctggtatagccaaagtatccaaaccaactgtaaaatcaacaccctcaatagcactactttcttctttatcaacaacaactttgacaggacgtggataattctttatttttcccatcgtttttatcggaacaaaagctatcctagttctttctgcactaggataaccggcaaatgacaagacagtagagtcaacataatgatatgtcggagcataaatcacggtaccattggccggcattgaataaccgcctccaccttgaaaatatacagtagtatcgtcagaagaaaattccataatatcttccttttgacaagctatcaacaatgatacgaacaatacaatatataaattacgtttcataactctctatttttattaacgatatataatttcattttcaggtaatggcggaacaaaacgagcttctgtaggaaaaatcatacgatcattgtaagcattttccgtttgatctattggtacaaacatacgtttatacataaaaaatatttgtccctcaccataaaactcacgcaaatattcacgtctcaaagatttcataaaatcatcttcactaacaatcggtaacgcaggaacacctcgcaaatcacgtatttcatttaatttgccataccgttctgataaatcagaagcacactcagcagcaatataatacatttcactcaaacgaattaaaggcataaacgttgcataaaaaggaatattctcaggatctgcaaattgcaattttttatatttacagaaaaaatgcccggtagccccgactcccgatgcgggttcccattgcgactgaaaacgatagtcccctgtttcattggcaaacaaactacctgtcaagtaattttctttcggctgcaataaaaaacttcctgcattttctcctccaaaactataagtgtatatatcagcccgattcttcttatacatgcccatcaatacttcagaagaataaactctatcaggtgtttgactattccctaataattgagcaggatctacagatggaaaatattgtctaacaaccgtatctcccaatatttcattagccaatttacctgcattctccttatctccagcgtacaatagcacccttgctttcaacgctttgacagcataataattaaatctcaattgtctatatctcaagtaaacatcaccctcatcctctggcgaagatgccataggacctttttcaattacaggatcttcagacaaagctgatatagccaaatccaaatcacggataattttatctttcaacacaacatccgcagctaataacggcaaattggttatatctatggattcattatacggaatagattccccttgtggtttttgactataaataggtccaaaaagccgtaacatatcaaaatgcaaaaacgcacgcattgctaacatttcacctttaagcaaggctgcctcttccttagttattacattattctgattttcaatatttttcaaaataacattacaattcaagattgttgtataagcattttcccaaacagatgacaatgtagtcttcaactgctcacccgaataattccaattcacggcatcagcaagcattgacccagaacttgctgttggcaaatatcttgcagccaacacatctatcatctcgaaagaaagatttcttccatacaaagcatcagctaccaatttattatatacaccgtttactgcagcataaaaaccacttcgggtagcaaacaactgttcttgggtttgtttatctttaggtgttacgtccaaataattatcgcaaccaaccattaagtatcccaaaaacaatactaatatcaataaattattctttgttttcatatttcaccatttagaaattcaacgaaagtcctaattctacagtacgggcaaacggataaagcgtaccacgctccgacttgattgtagaagcacggaacacatcacgcattgaagcctgaacttttaaactactcaaaccagccttacgaatccaaccatccaaaaactcataacctacataaatagactctaatgccaaagcattttctttttgaataaaacgactggacatcggtgtactggaagcatccgctatatttttaaattttctgatatcacctggcttttgccacctttcataaagagcccgcttatcctgattataaacaatttcataatctgtaatgttttccactttattaaatagagcctcgttaaaaatatgagcacccatctggtaacggaaattcaaactgaaagagaatcctttataggcaaacgaagtacctaatataccttcaatatcaggacgtgaatttccgcaaatcacttcattgtcataactgtaatcataggtataattaccatttttatcatagaacaattcacgaccggtagatgggtcaatgccggcagacttaacagcccaaagatcatcaggatctgcaccgtcataataacgcatcgtattacgtcccttgccatacttattcaaactgcttaacttattaccaatctcatcaagttccgttttctgagttcttaaattacccctaatcaaccatgaaagtcttttatccaaattttggataatatagtaggacaaagaagccgtcaaaccttgtgatatctgcttacctgcattcgtagcataagtagtaactcctgaagaaagtggcatatttacactaatcaacaatggatctgtaactttgtgataataatcaagcgttgcagtcaaccgtttgttcaacaaagttatatcaacaccaacgttcttgtccaaagttatctgccagtccaaatccggatttcccaattgtgccaaagcagctcccataccaaaataattggaagagccatattggaaattaaatgtagtaagagttttagacgactcgaatccttggttaccgggattaccgattgaacctcttattttcaaaaaatcaatccaagcaatattgttctttatgaaagcctcattatgtaagttccaccccaaaccgacagaccatgtaccggtaaagcgacgagaagaaccaaatactgacgaaccattctcacgcaagctgacatccaactgataacgattatcgaatgaatagcctccattaaaatagaaatttacggaacgagaaaccacttcataaaatgtaggagctccgtattcaggatacccattagcaaaagagggataagtaaagtctccgacaggaaatccttgaacagaataaccctgagttaatgccgtgctaccaaacaaattacctccggcaactaaattcacttgatgcttaccaaacaccttggcatatgtcaatgtcaattctccctcatattgtgtctggtcagttgttgtggaggtgtattctccttttttagtctcatccttaatgtcatcgtagcgagtatcttcacgagatataaatttttctgtatcgtcttttgtataggtaataccaaaacgtgctcttgccttaaaagccgctgtcggcatatattccgctacaaaataattttggaatgtaagcgattttccctcatcacgactattctgactggcattccatagtggattagctgcacgtattcgctgtggtctatcccgtttttccaaccatttttctatacttccatcatcgttttgctttttataatatggatttgcattggcataatcactaaaaggaacaacaggattttccattttagtcaaattaaaagacatcttgttgctaaactggaatttagacacccgataaatcaaatccaaattaccactgacaatttcacgtttagaatccttcatgacaccgctgtttccattataaccggcacccaaaccaaacaagaaactgccttcaccaccttgtacataaagagaatgtttgtgattcactcccacacgcaaaggatctgccaaccaataagtatccaatcccccctctatttctttcaatttggcaaaatactgctcttgtaattttacattttctaacttgtcgtctgaagaataacgccctgttaaacgctcaaactccaacttttcacgtgaattcatcaaattataacttgacaaatccggtatcgtaaaattagcattaccattatagctaaccatcaatttaccggcttgtggcttaactgtttcaacaacgacaacaccatttgcagcttttgaaccataaatagctgtagatgccgcatccttcaaaatcgtaatcgaagccactctatttatatccaaatcactaattgcctgcagagtagattcaaaaccatccaatataaacaaaggctgattgggatccgcctccaattcatctcgcaaacccaacatactggattttcctcgtatttccatatttggcaaatgattcgggtccgaaccatataaattatcatcaataatagcaaaagcgggatccaacgttttcaaactttgcagaatattttgagtacccatcgtttttaaatcttcagcagtataggtacttgcagaacctgtaaagctctctttcttacgagtataaatacctgttgcaacaacctctttcaaagtctctgcagattcctttaaaactacttttaccaatttcgacggatcaccaacaacaacttcttttgattccattcctataaaagaaaacagcaaagtcaaattctccattttaggtaacgacaactcaaaacatccttttgcatctgttgccgtacccagctgtgttcctttaactaaaacagtaacacctggtaatacttgaccgctattatctttaacctctccctttatcacaattttatcaacctgctgagcaacctccttcacaggagtaataacaatcgttttaccttctaaagagtagctaaatttattacccaaaatgcaattcaagacctgatctatctgcatctctttctcttgaaatttcactttccggtcaacattcagcaattctgtattgtaaaacacatcatactgcaactgagctgtaataacatccaatacttctttaacagtcaactcgcttgactgaaatgtcaatttttcctgttgtgcgaatgctgaagcacttacaggtaatattcctgccaagcacatcaatgacacccaccctgcagtcaagaagcatcgtcttactttgtttctaacacaaagtaacgtaaacaaatttttcttgttcatacttttagatttaagttagtaatatagaattatcaatattaatcaatgcgactcaccatcaccgttttgccctgtatatcaaaacggatattggcagtccgctccaaataacgcaacacaacatcaaaaggattatattgttccaccaaaatgccaatccttaagctctgaatgtatataaaacacttcaaaatcataccacctggccaattttcgaataatatcctccaaacgctcatcttgaaaaatcacctttccctctttccaagaagaatattgcaaaggattaacccttacaattcttgcttcacccgtcgttatatcagctgtaaaatgatctcctggagttaaggtatataactttcctctactacaaacctcaactttcccttctgccaaggtcgtattccaacttccatcagtagtataattagaaacattaaaacttgttcccaacacctttattgaattaccattcatttgaatgtaaaacggacgtaaagaatccggagacacttcaaaataagcctctccctctagttgcacaactctctgcatgcctataaaattcacaggataacgcaacgttgtttccgagttcaaccatacacgtgtaccatctgccaataccaaagaatattcaccccccttaggtatatataaagtattataaacctcttctcctactgtcttttgctttttatcaacaacatacatcaacgacgaagaatcgccaacaaaaacatcagcatccgactctcttatggggtgcttgatatcatcaactaaagatatcatcttaccattagccaatgtcaacaccggaaccccgacagctctctctatttcctgaacaacagggactacagcagattgtttagataaattccaaaacaatataccaccaaccccaaataacaaaacaataacggcagccaccatcggcataaaaatccgacgacgcttatcatgtttcttttcattaaaacgctgccaccctcttatactgtcatactggcttgactgcattctatttttagcaatccacaaccaaaacaattccctatttgtaaatttttgtttcattacaatcattccgttttcatgtactaagatacacaactaacgaaatcgggtgattgtttttacagaaaaaataaaaaataatgagatttttttatccgaatctatttcttgacggataatccggtaagctttagtgatatgagtcttgactgtatttatcgagattgacaattcgtttgcaatctctgcatactttttcccttccaaactactcatgacaaacactttcaaacattgcgccggcaattgttgtataatttgtctgatacgttcaatatcacgttcttcatcttcagaatagtctgtattttgcaaatcttctatatattccagcaatttcgtatcatggctacgctgacgcgcataattttccaacccccgcaaagcccgatggcgcacagccgtataaaaacaagcagcaacggatttatctagttctatttgcaaacgatgttcccaaaaataagtaaacatatcctgtacaacatcttccgcttgtgcagaatctcctaaaaaaccttctgcataacgacataaagaagcataatacttatgaaataatttttcaaaagccctataatcattcctacggactgcctcccaatattgaatatctacatcaactacattactcatccatcagagcatataaaacgttcgattattatagacctcgccataataatcgaacgtttcattaaaaacaatttaaattattcagccataatagcttccacttcatctaccgtaattggagtacgtttatctcccaaaaagcgagaacctgtagaagttattaaaatatcatcttccagacgtattccgccaaaatccttgaatgtttcaatcttgtcataattcaagaaatctttatgcataccctgttctctccattggtcaatcaatgccggtataaaataacatcccggttcatcagtaatcacaaaaccttcctgcaaacggcgtcccatacgcaaagaagaggtgccaaactgttgaattggacgagtttcatcatcatagcccacataaatttgaccaagatcttccatatcatgaacatccaatcccatcatgtgtcccaatccatgaggcataaaaagagcatgagcaccagcagctacagcctcattgatatcgcctctcatcaagcctaaatccttcaatccctgcgccaacactttacaaacctcaagatgcacatattgataagtcacaccaggctttgcaatttcgatagccttgttattagcagctaatacaacattataaacatccttttggcgactgttgaattttccaccaacaggtatcgttcgcgtaaaatccgaacaataattcatgttgttttcagccccggcatcagtcaacatcatacgccctacttgtaaaatctgactgtgatcatgattgtgtaatgtctgaccgttctgcgacaaaataaccggaaacgatacagtgcttccatacgacgctgcaataccctccaatacacccgcaatatattgctctttcacaccaggcttgcaatgtcgcatagcagccgtatgcatttcataaccgatattacaagcttttgtaatctcttcaatttcgcaagcctctttcacagaacgcaaagaaacaacagctttgattaactccaatgaggcatattcttttaccaaagaatgatgtattcccaacaaatcttctatcaaaatcttattacggaagcgataaggaggcaagaaatgaatccgacgccctgctgcgattgcttgtttcaagcaatctgccaaattcgcaaaaggcgcagtttttccaactccaacttctgcagccatatccttaacgcttggctgaggacccatccaaataatgtcatccatatcaacatcattaccgaaaatatattcatcgccactatcaatgtctatcactccggcaaaaccaggttgattaatacccaaaaaatataaaaaggaactatcctggcggaatttgtaagtattgtcggtgtaatttgcaggggcttcaccatttcccaaaatcaacaccaatccattgcccattttttctctcaaacgagctcgtctgcttgcgtaaacacttttgtcaaacatgtctttaatttgttagtaaatgtcatttaaaaaggtgtcacaagataaaaagaaattttgacatacaaaaacaaaatatcaaaagcattctgctatttcttactaatataagtttacttctttaaaagtcaatctatttaggacaatgaaaaaagttagcgtaacacaagaaaaaccaaaaggaattcgaatacaaaaatgactaacgaaaaaatggaaacacatctgaggaccaaacattatttaaaatcattctaaacattagaaactgtaaataaactttcgattttccttgataatcgtaattacaatctgtaattttgaaacgattttcaaggagagacattctaagaaatcataataaacgtgtggaaagtagctttttgaaatataataacttgaaaacaaacaatttaaaaatatattctttaattaataacttattataattatgaaaccaacacatatcgaacacatcggtattgccgttaagagtttggaagaagctattcctttctatgaaaaagttttaggtctagaatgttatgcagtggaagaagttgcagaccagaaagtaaaaacagcattctttatggtaggacaaacaaaaattgaattgctggaatcaacagacccagaaggtcctatcggcaaattcgtagagaaaaacggaggcggtatgcaccacatggcgttcgcagtagaggatgttgcacaggcattaaatgaagctgcagaagcaggatgccaattaattgacaaagctccgcgtaagggtgcagaaggtttgcagattggattcttgcatccgaaatcaaccaacagagtattaactgaactttgcggtaaaaaataaaaagacttaaagatttaatgatgcgaagatgtgaaaatgtgatacccaccaacgaaaggcaatttacattttcacatcttcgaattttcaattcagggcatctttataattaaatattttcaaatcaacaattcaatattatggccacaaatcaagataaagtcaaggaattgattgacttacgtatcaaagctaaattaggaggaggagaaaagcgtattgactctcagcacaaaaaaggcaaatacactgcacgtgaaagaatcgccatgttgctggatgaagacagcttcgaagaatttgacatgtttgtaactcaccgctgcagcaacttcggcatggaaaaaaccaaatttttaggagatggtgttgttacaggacaaggtacagtaaacggacgagtagtatttgtatttgcacaggatttcacagttttcggtggtgccctttctgaaatgttggctcagaaaatctgtaaagttatggacaaagccatgactgtaggtgctcctatcattggattgaatgactctggtggcgcacgtattcaggaaggagttaattcattggcaggatatgctgaaatttttgaacgcaacatcttggcatcaggagttattcctcaaatctctgctattttcggcccttgtgctggtggagctgtatattctcctgcattgacagactttatcttaatgacagatcagacatcatatatgttcgtaacaggtccgaaagttgttaaaacagttaccggagaagatattacaacagaagacttaggtggtgctgaagtacattcaagcaaatctggcgtatcgcacttcatggtagaaaatgaagaagaaggaatcagcttgattcgtgatttattgtcttatctgccttctaacaatctggaagaggcaccaatgactgtttgcaaagacccgattgaccgtttggaagataaattgaacagcctgattcccgataatccaaacttaccttacaatatgttggaagttatcgaggctattgtcgataatggtaaattcttggaagttcacaaacgctatgctcgtaacatcattgtcggtttctgccgtatgggcggacgctctgtaggtgtcattgccaaccaaccaagcttctatgctggcgttttggatattgaatcatctcgtaaagcagctcgtttcgtacgtttctgcgactgcttcaatattcctattttgacattggtagatgtaccgggattcttgcctggacgcgttcaagaatatggcggaatcattactcatggtgcaaaattgatgtttgcatacggagaagctactgtgccaaaagtaactgtaacactgcgtaaatcctatggaggtgctcatgacgtgatgtcatgtaaacaattaagaggagacttcaactatgcatggcctactgctcagattgcagtaatgggtgctaagggcgcaattgaagtattgtatggcaaagaagtagcagccatcacagatccagaagaaaaagcaaaattcattgcagagaaggaagaagagtacaattcagcattcgctaatccgtacaaagcagcctcttatggttacattgatgacgttattgaaccgcgcaacacacgtttccgtgtaattcgtgcattccagtcattacagacaaaacgtgtaaccaacccaatgaaaaaacattctaatatacctttataatcttaagttatgatgatgttagcaattaactggggttttgcactcttggttacagggattggaatcggaacagtatttttgctgttgattgtgttaatttggattattaatctgcaaaccaaacttaccagtgctataaatggtgagaaaaaaacagttgcagcagctcctgcagcagccgttacaacagatacacatccaacaccacacgaacaagcggctattgcaatggctatgcacttgtattttgacgctcacgatgaagaaccccatgtaatcacaatcgaagaggtagaaagacgctactctccgtggagttcaaaaatttacagcatgagaaacacagttatcaagtaaataataaacaacgatatgaataaattcaaaatcactatagacggaaatgatttcgatgtcacagtggatgttacagatcataagaaagcaaatgtagaagtaaatggtatttcttatgaagtgacctacgaaagcaaaaatacaacagttgcaccggtagcacgcaaaaatgcagtatctactactccggcagctcagcaggttcacgtatcagcacctgtatccaattctggagccagcatcaaagcaccgctaccaggaactatttctagcattaacgtgaaagtaggtgaccaagtgaaacgtggagacatcctgattatcatggaagccatgaagatggaaaacaacatcatggcagacaaggatggacaagttaaagccattcatgtaactccgggacaggctgttgcacaggatgacagactgattgatttggcataatttcactgtaaaacttgttagcaatgaaacaaataaaaaaatatcttttaggaatagcagcctttctgggactattcattacaccatttactgccagcgcagaagagatgtctctgggcgagagtatggtgaaattcatgaacgatacgggttttgcacgcttagttgatggtaattggctatgcttggtaatgattgctgtagcctgcattttgttttacctcgctatcgttaaaaaattcgaaccgcttttgttattgcctatcgcattcggtatgttgttaaccaaccttccgggagcaggtttgtatcatgctgaactatttgagggaggacatgtacattgggcaaatttcgtagatgcaaacaatgttggattattggactacatctatttaggtgttaaattaggaatctacccatgtattatctttattggtgtaggtgcaatgactgactttggcccgctattggctaatcccaaaagcttcttattaggagctgctgcacagattggtatctttgctaccttcttagctgctttatgtctgggattcaatttccaagaagcaggttctatcggtatcatcggaggagctgacggtcctacagccatctacttaacttcaaaattatctcctaacttgttaggtccgattgccgttgctgcatattcttatatggcattggttccggtaatccagcctcctatcatgaaagcgttaacaacgaaaaaagagcgtgaaatcgtaatgaaacaattgagaaaagtatctaaaacagaaaaaattgtattcccgattgttgttaccatcttcgtatctttattgttaccgtcagcagctccgctaatcggatgtttgatgttaggaaacctgatgcgtgaaagtggagtcgttgagcgtttaagcaagactgtacaaaacgaattaatgaatatcactactattttcttaggaatttcagtaggtgctactacaacagcagcagctttcttgaacttccagactttagcaattctcgttatcggtgttattgcttttggtttgggttctgctggtggcgtattgttggcaaaattcatgaacttattcttgaagaacaaaatcaatcctttgattggttctgcaggagtatctgccgttcctatggctgctcgtgtatcacaaacagtaggtcaggaagctaatcctggaaacttcttgttaatgcatgctatgggtccgaacgtagcaggagttatcggttctgctgttgctgccggtattctgttatccttccttggataatttcagaacaactagtataaaaaagtcttcgttaaataacgaagacttttttttatacacccatttaactacaaactaattccgtccatacaaacgataaagaggatacactgcctgtaatattttagtacgtaacagctgaggataatcaggatgttctttaagaaatttattcacttccaaccacgctgctttacttctatgctgtgaaagtaaagaaacagtccaatttgtcggaaaaaatatatcaccagtcctttggacatcttgcaaagcctccagagcaggtctgatatactttacagcataatcaccacgactaaaatgattcaaatagctcaatgtcattgcagtccacggctcaattcgcctattttctgccatcagcaaagaattaaacaaaagatctaattgagtagtatctgaaaccactgcacgtgaaataaaatcaaattgacgcagacggtctggattcgttatacgcatcctttgcgtagaaaggatatcattacatttctcaggacaacgtacacacaattcatatgccaatgttgtataatcattttcattcagctgctcattattttgtttgttccaaatctcataaagctgctcactgagcataggagaaacgtgattggcaattaaaacacgcatcaattgagtccggcaagagccaagagcatgcgacaatgcaatatgtaaaagctttttctctgccagagttcgttccataccctggtatgtttgtaaaggcattgaaaaatacgatacaacagatgaggctatcaatggatttttctctattacaatcccattaaacaaagaattgagccattcataatcagcaatattaccggccaagtaattttcatacaatgtcatcaaaacagctaatctctccgtatcatcagaaattgtataccaattcaataacatccaagccaaacttttagcatctggaataaacaatccataacctcttccatccacattaggcaatatttgctcaggaataaaaggcaactttatttgtgtcacggtatcagtaagctgcacatccaatatagaatcttctatgccacaaagccggatatcaaaactctgtggccatgtaaatccacgtttaaatgggtcccgttgtataattttcagcacatcacctttttgcacaaaataaatatgtggcatacccttctcatgcacccacacttggctgaaagccttcagatcaacatccgtatgtttacccttaatttccaccaattcttcccaggtggcattgctataagcaaaggtctgcacatattcttgaattcctttacgaaaacactcctcccccataaggtcaaccatcttcttcatcatgataggagccttattgtagattatctgtccgtatacaagccccgcattgttcaggttaggcaatgcttgttttatagcatttgtaccaggtgtgcgatcttccgacaacgaagcccgcgtatatgtccgcaaccaattcaacaaatgatttacattgggaaaaagaggttcacaaatacaggcagcaaaatagtttgcaaagacctcctttgtccagacatcatcaaaccaagccattgtaacatagtcaccaaaccacatatgtgtcgtttcatgagctatcaacttggctcgactcaattcctcatccaaagttgcgttttcacttaaaaacatctgcgtatcattatataacgttgctcctgtatgttccattccaccatactgaaaaccaggtaaaataataaaatcatactttgcaaaaggataaggtactcctgtatatttttcaagccactccaatgaatacatcacctgtttaaaaatagtatccaactgcgccacctttttaggatcagtttcacgataataagccgcaattgtccgccctttttctgtatattcttgacatgacaatttccccgcaacaaaagaaaacagataggtactcaaaggttccgtcggagcgaaatggacccattgggaaccatccgacatcgtctcttgccctattctattcgtatttgaaacagcctgccaaccattaggcacatttaacgaaagtataaactcagcttttaaatccggctggtccaaacacgggaaaaccgtacgagcccgatccggaaccaataaagtatatagaaattcatcatttctatttaacgattgattgccagcaataaattgaatgttcacctcattctgtccgattttcaattcatcctgaggaataataatgtgctcatttttaaaaatataattcgacacttccccattaactaccacatgcttcaaattgtctgctgcattacgaaaatccaaaaccacctcttgcgaatgttccaattcaaacccgatagtcacctctccagctaccgatatgctcttctcttcaggaacgacaaatgataatctatacttcaaattttcaattgtctgtttacgccattgagctaattccttagaaacaccgacatcatacaccacagcctctttgctcgtcatacgacatcccacggacatacccaaaaacagcaatatgtacaaaccatagacttttttcatattcataatttataaaaacacagcctgtcaaaaccttacagtttcaacaggctgccatattaaaaaaggttgtgattatttaccccacaaaacaatcaaattaatgatagtattcatcgccttctccatcgtattcaaagaacaatattcatatttaccatggaaattcatacccccggtaaataaattcgggcaaggcagtcccatgtaagacaagcgtgcgccatccgtaccgccacgaataggacgaacaatcggtttcactccagcctcgctcattgcctggaaagccttgtctatcacttcaggatacggttcaacctgctcccgcatattataatactgatctttcaatatcaacttaatgacccctgccccatattttgcattcaaaagatcgactattttttgcatatattctttcttgtcctcaaatttttcccgcgaatggtcgcggataatatactcagacgatgcacattccacctctcccttaatagaaaccaaatgatagaaaccttcatatccttcggtatgctccggacgctgacacggaggcaacatcgcattaatctcagctacaacctgcaacgcattgatcattttatccttagcatatcccggatgaatattttgaccttgcacctctattttcgcacttgcagcattaaaattttcgtattccaattctccttcaaaacccccatcaatagtataggcaaatttagctccaaaatgttctacatcaaagaagtcaacacctctgcctatttcttcatccggagtaaatcccaaacgaatcttaccatgcttaatctccggatgcgccataatatattcagcagccgtcataatctcagcaacaccggctttatcatcagcacctaacagcgttgtcccgtctgttgttatcaacgtatggcctttataaaaactaagttccggaaaatctgccacacgcatcatcagattttcattcaaccgaatatcatttccgtcataattttcaataatctgaggcttaatattggctccgctcatatctggacttgtgtctacatgcgagataaaccctattaccggacgactttcataacccggtgtagcaggaatagttcccatagcataaccattggcatcaacttccacatcctccaagcctaaatctttcatctcctctgccaaatgattcaataaaatcaactcctttgcagcagaaggatatgtctcactctccggatcactctgtgtgtcgaaaccgacatatttcaaaaatcgttcttttaattccatatatctatccattaaattaatacctatcaacattcttcttttgcacgacaagcatcccaaataaaataagcgataattgctacatacataattacagccaaccactcagcgccgctccatgtattataccaatctgctcctgcatatttcaatacagcgcttacaacacccatcaaagcaccaccggcaataaaaccggaagcaatcaatgtaccacgttcacgacgcaatttatttactttttcatccttactgcgagttgaaataaaccaacttaccaaaccgccaatcagcaaaggagtattcaaatccaatgggataaacatacccaaggcaaatgccaaagcaggcacaccaatcatagtaagaatcaacgctaatgccgctcctgcaaaataaagcatccaaggagtagctcccccttccatcaaaggtttgattacagcagccatagcatttgcttgcggagccactaaagcattctctccgacaaaaccataagtctggttcaaaaccatcatcacaccggcaacggtagcagcagataccaacgtacccaaaaatttccatctttcctgtttcaccggagtcgtaccaatccagtaaccgattttcaagtcagtaataaaaccaccggccatagacaatgccgtacagacaacacctcctataatcatggaagccatcataccgcttgtcccgctaagaccggcactcaccaataccaacgaagccagaatcaaagtcatcaatgtcattcctgacacagggttagaccccacaatagcaattgcattggctgccaccgttgtaaacaagaatgaaatgataaacacaatcaatatcgccaccattgtctggaaaagatttcccaatactccaaaatggaagaaaacaaaagtagtaatcaaaacagccaacaaaccggtcatgataaatttcatcgaaaggtcgcgctgcgtacgctcggcaacttcggcagttccctttttaccacccaactctttaactgccaaacccagtgcctgcttgataataccggaagaacggacaataccgataataccggccattgcaataccgccaataccaatatggcgtgcataattagtaaatatctgttctgcagacatatctttcaacaacatactcacgccctctccaactgccactgtctgtccatcagcgaaataactgataaaaggaatcagcacaaaccaaacggtaaacgaaccggcacaaatgattgctgcatatttcaaaccaatgatataccccaaaccgagcactgccgcaccagtattgattttaaagactaattttgacttctctgccaacaattcaccccagcccataatacgagtggaaatagtttctgtccaccagccgaaagtactgatacaaaagtcataaagaccacctaccaatccgctcactgccaataattttgcctgatttcctttcttttcaccagaaaccagcacctcggttgttgctgtagcttccggaaaaggatattttccatgcatatccttaacgaaatacttgcggaaaggtatcagcatcaagatacccaacagaccgccaaacaaagaagaaaggaaaatctgataaaactgggcatccaatcccaaaatatacaacgccggcaatgtaaaaatcgcacccgcaacaatcacaccggaactggcaccgatagactgaatgataacattctgcccaagcatattatcctttttcaacagattgcccatccccacagctatgattgcaataggaatggctgcctcaaacacctgtcctaccttcaatcccagataagcagctgctgccgaaaaaataattgccataataataccgaaaatcaccgaataaggagtcacttccttcggtttgctccccgcgggcataataggcttatactcttcgcccggattcaattcccgataagcattatcaggaagggaggtcaacttttgctcttcttgtcccataaatttgtattatacttattgaatatttaatgctttcaaaaataatgaatatttccattgattgccccactttcccataaaatatcacagagaaagaacaattaaatctgcaagccaatcaaaaagttgcaccatctgcaatatttgaaaatttccgtcgcaaccattgcaccagacgcatcgtcacttccggaccggaataaggtataaactcgtcatacatatccgactgttcaaaattcgaaattccgatagacaacaccgtaattccctgacgtgccgcctcccgtaccatttccctcacatgtattcgcggattcatatttccggcagctgccgtcggcgttccatccgaaatcataaacaacagcttattctgtgtacgcgccctaaatttctgcatgccatacccaatggcaaaaccgtcagcattgacatacattccctcctgtgaaaacagttttttcaagttcaatctctttccgggctcataaaacttaacaatctcaacccgctcctgtttcacccgatgcccataaattgaaaagcgaatatccggattagcatcaaaagcaatggccaatgcaacagacaacaccaactgcatttccaatttatgctcatccaccatcgaccccgacaggtccaacataaccaccacctccaacaaagccgacggagccggcaactcttctaaaaatatttgagaattaaaatgcacctgatataactcatcctcatccaattctccgctttcctgctcgtaaaagacacaagccttattcatttttgcctgaaaagtcagaaaattcaatcgaatcttggcagctaactctttagccctcctcatcaccatttcatccacaacaccttcctgagcatccaactctcgataccgtccggacagaggattcccttcccttttccgcccctgctgtctttgcctctcttgcacatccgataccggtgtcaaatccaacgactttgtcaaatccaaaaacaaatcatccagaattttcacatccacatccacaggagccccctccacctccaaaggcaaattcatcatcaccttcgaataaaaattaaacatcttcggtcccttctcctccttgggagacaaaaaacgggcactgattttccttgccaaatcatacacatcaggaggttccaaaactgcataatccttcacagcatccaacatctcatccatccatgccaaacgattcctatgcgaagacaatcgttctacaaaaatatcgtcagacagtaactccggataaagcaactttgtcgccagataattccaccgcacatcctccaaatctgcaaatctcaaatccttttcagcccttattcgagccatcacatagaccatattccgtgcagcacggagataataataataccccggatatgcttggacaatccttccctcaatcctcctgtcctccagcaagtgaataatatatttttgttgataagtgcaatgaaaatgctcatagcgtccacggctaaaacacaaatgtcccaattggtgaatatactgcccaaagaatacctccgaacggattttctcagaaaccttcatagacagaatctcgggattcataatcaccgaatcaaaccgagacatagcataggcattcttggaaaacaccaccctcggtagctctccggccatgtgcaaagcaatcttggcgcacacaggcatcagctgataaatattggatgtttccggaaaatccttatccaccacctccaatccgtccggaaagactccccaccatctgcggtcgaggacatcacgataaaacaactcttcaatctcttgaccggtcataccatctgcactaaagaacgggccaccaaatgctctccggcaataatataattagtcaggataacctcctccaccacttcccgcaacgaatatccgagttgcatataagcagcagcatccaaaacctgccgtgtagaaagcgccaccgtcaacgcctcttttctctcagcctgtcgcaacagatgggcaatttctgccaattgcgcggctgctgccggtttcacagccggataacgttcacaaatcagggttgtctcttcatccgtcgtcagataatccagcttcaccttaataaagcggtcttcaaaagccgaatccaagcgttgggtagagacatatgcaaaacccgtattccccgcagccacaaaaagtacgttttcccctttattataacgaattccggaatcctcatcatacagatacgactgttttctatccaatatggtcatcaaaaaattggcagccaccatcgggatacgggtcaattcatccaaaaaaatcaatgttggtcgttctgaaacaaatgccttgaaaaattccgacctgacagccattgtttttccctcatcgccaatcaccaaccctccgagaaacatcttcttcggcttaaaggcctgccccatatcaaaggcataaaaatccattcccattgcctcagccaactccatagccacagacgactttccacatcccttcggtcccaataaaaaaggatacttcttcaaataaagtgtatgacacaaaaactcccacttcaactgcggaatacacaaatcccgcgaatgcttcggtggcgtaaagaaaagagtattattctgctgcatactctgacctcccgttatttatgcaacccacattccttatgcgcaggatcttcccaccaccaacggcctgcccggatatcttcgcccggcttgacggcacgtgtacaaggttgacagccaatactaggaaatccttgatcgtgcagtttgttataaggcacaccatgctgctttatatattcccatgtctgttcttctgtccagtcaatcagaggattcaccttcaacaaaccattattggcatcccactcgaccatgtggttgtccgtacgggtgacagattgctcatgacgtaaaccgcatatccatactttcaaaccggcaaaagctcgtttcaaaggttccaacttacggatatgacaacacatacgacgtttttctatactttcatagaacagattcactccatgttctcccaccatcttctccacctcccgataatccggaaaaaacaactgcaccttaataccataagtcatattggtgcgttctatcaggctataagtctccggaaacaaacggccggtatccaaagtaaacactcgggttgtccggtctatcttacaaatcatatctgtcaacacttgatcctcaatgcttaaactcgaagatagtgcgacttcccctttgtattctttcaaaaaatattccaatacagcctctgcgccatgaccttcaaacctgctgttcagcgctccggctaatgctgctccgttttccatactgattgttttttaccttccatcaactgaatactcccgccagatatttctgtgtcaactccttttgcggattcttgaatatctgttctgccggtcctgcttcaataatttcacccatatacatgaaaatgacataatccgctatacgcaaagcctgacgcaaagtatgcgtaacgagaacaatggcatattcctcccgcaatttcataaacaaatcctctatcgtcttgctcgaaatcgggtccaatgccgatgtcgcttcatccgctaaaataaactgcggctctacagccaacccgcgggccagacacaatcgctgttgctgaccgatagacatacgtgctgccggtgtgtgcagacggtctttcacctcttcccacaaaccgacagactgcaaataatgacgcaccaccatattcaatttcttccggttgcggattccatggatacgacagccataagcaatattgtcataaatgctcatcggcagcggacaaggacgctgagacaacagccccatcttacggcgtatatgcgtaatttccaccccctgtgcatacaattcctctccatctaccaacacatttccgctgattttcacatcctcgttattatccaaaagacggttcagactcttcagcaatgtcgattttccacaccccgaaggaccaatgatacaagtgattttacggtcgggtatctccacggaaacatccttcaaaatacggttgttctgtattgttacattcaacttatccaccacaatattcgatctcttcacatcatccgtgcaaaatttctgatcgggacgaaacctccctttacggagctctgtttcattccaatctttcatataccacttaatcttcttgctcaaaaacggaatcttcatatatctggaattacaatattactgcactttattctttgaaaaacgattggttatcagtcgccccaaaatactcaatatcaaaactataatagtcaatatcaatgctgccgcataagctctttcctgcacttccggtatcggactgctcaactgaaagaacaccgccaatggcaaagttgcagccggttggcttaaagaagctggaatactgtccgtataaccggcagtaaacatcaccgctgctgcgtcaccgatggcccttccgattgacaacaaagtcgcggtagcaatacccggcgcaatttgtctgaccaccacttttatcgtttcatatcgcgtagctcccaacgaataggaagcattcagcatatcctgcggcaattctcgagctatctcatccatcgaccggataaatatcggaataatcaatagcgtaattacaataataccacccgccaaagatgtcttcaaacccagataaatcataatggtaaaagcaaaggctccatagacaatggacggtatcccgaacaagacatcataagccaaacgggccaaagaagctcgttttgaattctttttcagataaacattcagataaaacaccaccggaatactgatagccaggcccaatatagtcgaagcacctacaatataaagcgaaccgacaatggcattaagcaatccgccctctttgccgatataaaaaccgcctccgggcaacgaagaaatcatctcccaattcaaggctggccacccgttttttataatcgtaaacaagatactgcctacaaacagaaaaaccagtaatgttgtcagcaacatcacccctttcatcaccttttcctctataaactttatcttcatgtcacactctttaattcagtgatttctcaattttccgcaatatcagccgcgaaccgatattaaacacaaatacgacaacaaacaatatcaaagccgacaacatcaaagccgattcataaagaggcaaagacaacatctcaccataattgtttgcaatcaatgccggcaacggataacatccgtcaaacagcgaatcaggcaactgcacaatattgccacacaccatcaacaccgctatcgtttcacccatagcacgtgaaatagccaaagttacagatgctacaataccgggaaaagtcttcttcaaaagcacatattttgttgtctgccaacgagtcgctcccaacgaaagcgatgcatcacgcaactcctggggcaccgatgaaaacaactccacaaacagactgatcatcagcggaagcaccataattcccaatacgattccggcagtcaaagttgaataaccggtagaatactccacaaaatgcggggccaaatggtcggaaatccaaggcaccaccaccaaaattccccacacgccatacaccacagaaggcagcccagccaatatatccaaagccgggaaaaccactttcttcacccacgagcgtgaattctctgtcagaaatatagctgtaaacaacgataccggcaatgtccatacaatggctatcgccgtcacccacaacgtacccataataaaaggtagaaaaccgaaatcccctttcatgggtttccatttcgaagtaaacagcagttcccccaacgatttttcttccagaataggcaacgatttaatcaccaatcccacaccaatcaatatcaacagcaacaccgacaccatcgtaaaggtaaacatgaccgaaccggccatcttgtccttcaacaatcggaatgccgatgtcttttgtgctactttaaaatcctctcccgaagtcatttcttctgtaatttcgataattcttccattaaaatttcaggtgccaattccacataccccacttccgaagcgaacttctgtccttcggtcaaaacatattccaaaaatgccaccacctccaccttctccggcacaccacgtgccaccaaatacaaattccgtgccggaggactcgggaacttaccttcagctatcgctttattcaattcagtgctggttgcatagaaattctcctccgggtcaatttttccgttaccattcaaatccaacggcatcaccgcaatattattatatggtttcttacttgtaatgtcgtaggcataggcgatgttattaaaaccgatacccaccttgtcacgctgcacgacagaagtcacgcccggatctccgaatacggcagtaccttccagatcttcctgcttgatatccagccaggctgcaaacgtctcagcagctccgcaggcatccgaccgggtatacacatgcaccggaatcttacttgccgtccccaatacatccccccatgtcttcacctcaccctttgcccacatacgtacagcagcatcccgcttcaagcctgtagccaaaatttcttttatcaacggattgttcacattaatcgtaggcaccacagcatccttcaccacagctatcgggaaagcccccttctccaactcctgcggataaacatcccgcgacaccatccccaaatccacaaccttcgccaatgcatcggtaatccccttgcctgcaccgcctgccgaaatatcgattctcacatccggatgcattttacgaaactcttccgcccaacgcaccacaatcggatacaaggcaaaagcacccgacaactgaatttcccctttcaatccggaatataactcccttctatatctcaatttttcctgttcctgagcattcacccgctccacacagccacaccacaacagcgtcactaacaagaagaaagaacaaacaatccgcatagtataaatcattacgtttcagtccattttttacaaacgtacaaatttatggcatttggtcataagtgccatacatatctctcccctttttactacgcttttttacttattatttaccaagtaccaaatcaatcaacaaaacagccgtttccttttcctctttcgctgcatctttcggtttccaggctacaacaaatctgacagaagcatcctttacgttataaccttttttattccaatccagtaacttttcctgcatatcccgtgataactttgcaaccggtttatgtgcatcattatataaaacaaaattgttatatatcagcatatttccgcttctcaatcccaatatatcccgttttatatctttaaagaatcccagataaacatctttataggacaattgcaacaccaccttctccggcaaatcatattgcccattgtcttccaactctatatctgcgcctaaattattgaaacaatcactattcgtacatataaacaaccgtttttttgcccgggtcattccaacataataccgcctcatcagatcatcgtttttctcatgcccggcagtaacatacatatatacatcatcaaactctctgcccttagctttatgaatagtcgacaccacaacatcctctttcgatacatcacaaaaatcctctacagacgactcaaatacaaactccttaaaatcacttaaatatttacatcggttggtttcttcaaaaactgtcagacaacgtttcaaataaaccagactcagacttttatcgtaatactcaaaagtttccctctttgcctctttccacacttcgtcagggatgattgaagaatctgtctgcttatcaacgcacttcaaaaaatatctcacctctgccatattccaaaaacgaatgccctccatcgcttgtatcaacttgcattttacaccattttttcttaaaagagcaactagaatagctgcttcttcattggtttgagttaacacacacaaagaaccgtcacctctattgctcatcaccatctctacaaatggctggtacatatattttgaacgatagcgtatcaacctgacttctccatcatcggactttacagatttgatcggttcgcttttcatccgtttccctatttttttaacaaaagaattcgcaaaacacaccaaatgccgagcactgcgataattctccgtcatctcaatcagtcggcttccggacattttcaacaactgttccatatatccggaatctgatccccggaattcgtatacattctggtcgtcatctcctactgctatcaccctcatatcttcattgtagtccatcagcgccttcacaagcctgaactcctcttcgcccatatcctgcgcctcgtcaatgaccaacaccgttttcccgattttattcggttccacctccctctcattaatcatatcagcagcctttgccactacacctttgacatctgcaagattgcctattctccctaaaagatcaaaacaatacgaatgaaacgtttttatttctacataatggactgcattttctatcaaatccatcaaccgttgcttaaattctgtagcagccgcacgtgaaaacgtcagcattaaaagctgttcatgcttcacatcctcgagtaacaggagagatgcaagcttatgaaccagcacccgtgttttgccactacccggtcccgcagcaaccacaatacaacgagattccttatccgatataatatccatttgtcttttagaaagctgtccgaatattttcttatacttttcaggagtcaaattacgttgaatctcttcacctctttctcctttaaaatatttagagataaactttttataatccatctgaaaataatcccggacatatctcaaagctgcgtcatagtcccgcaccatcaaattcgcatattcacctacaatatgcacctgctgaatcttctgcttataaaattcatccagcatgcgataatcttcctgcttgtatcttgccttactatccttaattctccggatatccatagcattataaagcaccagaaagccaccttccagcttaagagcaccgatttttgacaaatacaaaagcgcttcttctacatcatccaatcggatatcctccaattctgtaaaaagcgaccttgcctccgcttttattcggtttaaaagttcaacaacagaaaattgaaccgcaccattgctttcagcctccttttcttcacctgaaaccaattgatacagccaatcaatcacaaaccgacagatttccacccgtttttcccaacgttttacaatcaattcagaatctatccgcaagcaaagcgtcaaattatgatgagcatcttcagttttagaaacatatcctttaacaacaagaaaataaagcaacgtccggatatccttctcattggaagctccgattccgtcattcatgacattttcattcaattgcttatatgaaatctgccaggaatcatccgaaatatgtttaagaatatactgttccaatttggcaaaacgatcaagcaacaaatgtgatttacgagacgtatcaccgacatcctgcagataagcagaaatatctttcgtatcagccagaatcccctcctgtctcatcttttccactgccgacaccacctcatatttttccattcccaatatatcagccaggtaatcaatacgtgattctgccgtttcagcatcttgggctttattggtatatttctgtgaaatcaacgacttgataattcggacagccttctctatttcattccgttcaaataacagagaggcagaaatacgttctcttgcttcatcgacatttttcaccgtaattccggtagcatagacgtggggaacattgtttccccttaccagatatccgccttgctctaaagttgccaatgccgttctcacacgggtttctatttcagaaacagagtcatcccatcccgcctgccgtgcaatttccaaagcagagcaataaattcttgaacgcttttttgtcaaattctttacagccctccacacctggctgatttccctcatactcaattttgtctgattcaataagataaaatgcttatccaaatcattatcaccataaagcacataacaacgggcattaagctgaggatcgcgaccagccctccctgcttcctgaacataattctccaacgaatcagaaatatcataatgcaccaccagaccaacatccttcttgtcaacccccattccaaatgccgaagtcgccacaataatacgcacatcatcattcataaatgcctcttggttcacaatcttattgtcagcatccattttcccgttaaaaggcaatgccttaaaaccatcctgagttaattttttagccaacttccacgttcgtcgagtccgtgacacataaacaatcgtcgggcaatcggattccacaataagttttctcaatttcagatatttatcgtcatcgccctccgtatgtataaccgaataatacaaattagttctcgaagcctttgatgcaaacaattccagatcaagatccaatgtctgtttgaaataatcacaaatatcctgcaccaccttttgttttgccgtagctgtaaaacaagacactggtatagagtttttacacttcttttgttcctgatattgtttgataaatttgcctatatacaagtaatctaccctgaaatcctgtccccaagcagaaaagcaatgtgcttcatctatcacaaaacgcacaacatgtcgcattaacaaaatccgttcaatcgttttcgatcgaagcatttcaggagaaatgtacagaagagaaacctctccctccatcaccctttgtatagacatcgcccttgagatcgggtccaacaaaccattaatggttacggcatcagtaataccgcgagcagccagattatccacctgatccttcatcaaagattgcagaggagagataacaactgtaagaccgtgtatcgacgcaccatccatcagtgccggcaactggaaagtaagagattttcctcctccggtcgggaatatagccagcagcgacttgccatttacagctgcttccgcagctttttcctgcaaaggttctccatcataagtacggaacttctcatatccaaaatagatttttaaattagcaagcaccgataattgtgtattacaataatcacaccccttttcacatctattgtgtcgcaaaagcttgataacatattctacgtttggaaaattgcacaacacccatcccggagtaatcgaactacgatccgaagcatcaattaaagccaatgcatatgccagttcacatgggtattgctgtatcaacatatcaatgtctgcatgttggcaaatttttcctttataaagctcttttatcaaaccagacaatccccctgtcatatactccgccttcaccatacttaaaaaacccttaaactcctctttgtcatacagaagcgatgcaaacattttgcgttttccctccggcaacaaattccattgtgctttttcatcgcacaataattcataggctttcttacaatcattaactggattgttaagctggtcactcaacaacttatcgtctttcaccaacttatgataagggcgacttgggaataataatggcgaaaaataaagagtatcgacccaaacatgatggcattcattctccgcatataaatatttagcatcatgatgaatgatattatgcccacataaatattcaacatcacctacaaattcaaacaactcatttttcgaagctttatgaaattcagcaccgtcataacgaatggcccctatatcatgaattttatgatcagacaccccgacttcaacatcaacaacagcataccgacactcgccggaagaattatctccagtgtcaacacttacggcatacttggatttatctccgatgtgcccgagttttatcaatcggctccatattaacatactttctattttaaagtcttattattctattccttcatatattctgcaattttcttacggacattgtatccgcacacttccctatccagaataatcccctccggagaaataagaaccataaaaggaatggcgaaataattatacagtgaagtcgttatatccttggcatcgtacaactgtagatattcaaacttttcattctctaaagctctacgccactcctcttccgaccgatcggtagagacccccactacctccagtcctttttcccgatactcctcataaacgcttttaagatcttgaaactcccgacgacagggagcacaccacgaagcccaaaaatccaccaacacatattttcccctcaaagaagaaagtttcaccatctcgccagtcgctgtaggtaatacaaaatccggcgcctcatgccccacagcacaagcccggcatctttccaaaacagctttgaccggcttcaaagcatagcaatgataaacggacgaatccaattgtgcccaaaacttctcagtctgctcaaagttcctgtcggtaaaaaatttagcaacctgcgtgacaaatgccatacttttcgaatatcgaggcaacgcttcaaaaatctcctcatacacctgttccaacaccacatccaactcttctttagcactttgaacacgtgcccaattctcatgattattatcggtatccttacagatactgcgaagatgaaaataattatgatatgcttccctataatgttccatcgaaggcaacaactcgtaaacccgattatattcatccatgccgggcgaacctttcacttcttctatcaacatccgatccccattcaattccgcacgaaccgtaatcatcggagcatctataaaaaaacatatattaggagatgatgctaaagaattattcgagccgaccggcagggcataaagggtataatagcgtaaatctccggtctcgacctctgcatttatgacaaaatcatctgcacaggcattcactcgagcaatctctcctcgttccgcatccactaaaacaagttcaccattcccaattccccgaaccgacccctttactgttactttttccactgcagccatcacgttcattgacagcatacatcctatcatacaaatcaacaagaaaaaccttttcatcctaagctatttatttgttaaacctttcccaaatacgcaatattcgtaaaaatcaccaacatctgcaaataaaatcataacaaattaacacggcagtagctcaagacagaaacaaaaaaaagtttcgagctgtcacagctggaaacctttactactaactaacctaatacaaacttatgaaaaaaatgtcttcttgttttgaacgccacaaagataaactgacattgttacaaacccgttgcctctttgtgacgttttaattataaagcaaatatcatgccaaaagattgcaacaaggttgcactactgtttcattacctttgctgcagaaaacaaaatataatcggattatggcaaacaagaatcatcaacacagtcatggacatgaacatcaccaccaccatggcaacatgaaaggaaaaatcaccctcattatcgttaccgcactactgcttgtcggtgctgtactaatcgagaaacattgtgacatacagacctggcaactattactggtctatcttatcccctacttgcttatcggacatgacaccttgaaagaagcgggagaaggtatcctgcatggcgatgtgttcaacgaacactttctgatgtccatcgccaccctcggtgcactctgtatcggctttctgccgggcgcagctacggaatttcccgaagccgtattcgtcatgctgttctttcaagtgggagaactcttcgaggaatatgctgaaggcaaaagccgcgacagcattgctcacctgatggatatacgtccggacgtggcgaatgtagagcgcaaaggcaaagtcgtttccatctctcctgaacaagttgctgtgggagaaatcattgtcattaaaccgggtgaaaaagttccccttgacgggaaagtcatcgaaggaacatcctcacttaacaccgtagccctcacaggagaaagcatgccgcgcgaattatcagagggcgacgaggttatgtccggctgtatcaacctcacgggagtcattcgtgtaaagacctccaaaagcttcggagagagcaccgtatcgaaaatcatcagcctcgtggaaaatgccgattcaaacaagtcccggagcgaagcgtttatcacaaaatttgcccgcatatatacccccattgtagtggtggctgccttacttttggctgtagttccgccactgtttgcgcaagaaggctttactgtggcattctccacttggctccaccgcgcactcatcttccttgtcgtgtcgtgcccgtgcgcactggtcatcagcgttccgctcactttcttcggaggcttgggaggtgcatcacgcaaaggtatcctcgtaaaaggcagcagctacatggacacactggcaaaagtgggtacaatggtattcgacaaaaccggaacgcttacctgtggcgaatttgccgttgaagccgtacatcctgaagatttcgacgaaaaagagctgctgcaccttgccgcccatgtggagcatttctccactcaccccatcggcgaggctctgcgtgcggctttcccgaatgaagctaccgacggatgcaggattacagatgtagaagaaattgccggacaaggtatccgtgccaacgtgggaggacgcatcgtttgtgttggcaatccgaaaatgatggacaacgttggtgccaaatggcacgaatgccaccacataggaacaattatccatgttgccgtagatggcacatacgcaggacacatcgtcatcaacgaccgtatgaaagcagacagtccggctgccatcgcctcgttaaaacggctcggtgtagaacagaccgtcatgctcaccggcgaccgcaaagaagttgccgaaaatgtggcaggcaaactgggtctggatgcttatcacgcagaattgttaccaaccgacaaggtgaaatacctagaacggttgcttgccgaaaaagcggaagggaaatcgcttgcattcgtaggtgacggtatcaacgatgcacctgttctgaaacgtgcggacatcggcatagccatgggcggactgggaagcgatgccgccatcgaagcagccgatgtagtactgatggatgaccaaccatcaaaaatcgccgtagctatccgtatcgcccgccgcaccattcgcattgcccacgaaaatgtatggtttgccattggcgttaaaatcgcaatcctcatacttgccacaatcggtctcagcaacatgtggatggcggtatttgcagacgtaggtgtaacagtattggcagtacttaacgccatgcgagcattaaaaaccgatacaaatgattgaaacaatgcaattattatcctaatcccactttcttatggacataaattgactaagtctaaagtcaacatatttcagatagtacacaactatatatcaaagataacagattgttatctttgatatatgtttgtcttatatttgtgttatctttgatatatagttgagtgggaggaaagagggggaaaagagggagttttggaagagaaaacacaaaaaacggcaaccccgaaaaaggattgccgtcgatatacgattgaaaattttagagcttgctgcaaagttctgcgatacgtacgataacctgtacggccttttccatggaaggcacagggatgtactcgtaacgtccgtggaaattgtgcccgcccgtaaagatgttgggagtaggcagacccataaacgacagacgcgagccgtccgtaccgccacggatgggaacaatctgcggtttcacatccacatcctccatggcacgcttggctatgtcgacaatataatactgtgcttctatcttctccagcatattaaaatactggtctttgatttccagttcgatagacagacccagacgcttggagaattctcgaacaccattttccaaaacggttttccgcataccgaaacgctcgcggtcgaaatcacggatcaatatctccacaactgtagtctctacatctccggtaatggaatacacatggaaaaaaccttcgtaaccggctgtctggtcgggcgtttctttacggggcagattggcaatgaattcattggctgccaggatggagttgaccatcttgttttttgcatatccgggatggatgttgcgtcctttgaaggtgatttttgccgtggctgcattgaagttttcaaactccaactcgcccaattccccgccatccaaagtataagcgaatttggcaccgaattttttgacatcgaaatagtccggtccctcgccgatttcctcatccggggtaaagcagatgcacagtttgccatgcttgatttccggatgggccaccagatattccaaggctgtcatgatctcggcgattcctgccttgtcgtcagcgcccaagagggtgttgccgtcggtagtgaccaatgtctggccgacataacgtgccagttccgggaactcctccacagtgaggaaaatttccttttctttgttcaaaacaatgtcgttgccggcatagttttcaatgatctgaggattgacatgtttgccggatgtttcaggactggtgtccatgtgtgcgataaatccgatggcagggacttcgcgttccatgttggaaggcagaaatcccatcacatatccgttttcatcgacatccacatcctgcagaccgatagttttcaattcctcgcataatacatacgcaaactccatctgaccgggagtgctcggattcaatccggtcttcgggtcggactgcgtgttgtattttacatactttaaaaaacgctcaagtacagacatggctttgattaatatgctttagcaatcaatactctgcggtgagacggtttaccggtaaccatgtccttgccttcctcttccggagtgtcaaacggaatacaacggatggttgctttggtatcggccttgatctgctcttctgtctcgggagttccgtcccagtggcagaggaagaatccgcctttggtctcaagctgctgtttgaattcgtcgtaggtatccactttggtaatcatgctgtcgcggaaagcaagcgctttcttgaagatgttttcctggatatcttccaacagtttttcgatatgttcttcaattcctgcaaacggcaatgtctctttggtaagagtatcacgacgcgccacctcgatggtgtcgttctccagatctctttcgccgactgccagacgtacaggcacacccttcaattcgtagtcggcaaatttccaacccggtttctgggtgtcgcggtcatcgtatttcacagagatgcctttagctttcagggcatcaatcagcggctgtaccttggcactgattttctgcaagccttccgcacctttgtagatgggaacaatcactacctgcagaggcgccagtttcggaggcaataccaatccgttgtcatcggagtgagccataatcaaggctcccatcaaacgggtggatactccccaggatgttgcccatacatattccagtttaccctctttgttggtgaactgcacattgaatgccttggcaaaattctgtccgaggaagtgtgaggtaccggcctgcagcgcctttccgtcctgcatcaaagcttcgatagtaaaggtgtcaagagctcctgcaaaacgttcgctttcactcttgcagcccataatcacgggtacagccatccagttctgggcaaagtcggcatatacacgcaccattttattggcctcttccaatgcctcttctttggtggcatgagccgtgtggccttcctgccaaaggaattctgcagtacggaggaacatacgggtacgcatttcccaacgcatcacgttcgcccactggttgcacaggataggcaggtcacgataggagtgaatccagtttttataagtgttccatataatggtctccgaagtaggacggataatatattcttcttccagtttggcagccgggtcaacaacgacaccaccgccgttaggatcgtttttcaaacggtaatgggtcacaacagcacattctttggcaaaaccttccacatggtcggcctcttttgaaaagaatgatttcggtatcaacaaagggaaataggcgttgacatgtcctgtcgctttgaacatatcatccaattgacgctggattttttcccagattgcataaccatacggtttgattaccatacatccgcgtacagcagactgttccgccagaccggcttttaccactaattcattataccattgtgaataatcttcgcttcttgaggttaaaaactttcccatctctttataatttgataaaacggcagcaaatttaaagaaaatttcagtaggtaagcagttaatcagccagaattttatcttttaataaaatgaaagtcagcgaccgcatagcagccgctgacccggaatgaaaataaaaatattggttgtttatttcttggtccatcctttggtccaatcgtttcctgctttcaccgctccctgataagcagctgcagtaaagaatttgtcgctgctcaaatcagctccgccgtcgatggttccaacatacacgtcgctgaatgtgaacggacggttgatggtgttgtggttggcagcctctgtaaacattgcgctagagtaaagtccctctttacaatcaatatcgctcgccaaagtgatgtactgcagttttgattctttgcctaccaggctggtttcagtctgtgtggtttcagtagtcaagcacttaggtttgcctgttacgatggcattgtagatgttcactttcgttccggcacggaggcggataccgcgtttgccttctgctgaattgttaccaatcaaagtaaggttggcaagtgtaggccatgagcaaggagtggcagtagcgttgtctccgttgttgtctgcctcaatcagacagtcgccctggtcttttgcaccggtggtgcccaactgggttgctaccaggaactgagccttaccgttccatccttcagtccagtcgaatgaatcgtcttcgttgtctgtcactaccaggtattttgcatttacagaaccgccgaagaattcaaagccatcgtcagcacccttgtaagactggatgtattcaaccgttgtaccgttaccgacaccgtagaaggaaacaccgttggattcgtgttccgggtcgaatgcaaatccggtatattccaaacggatgtatctcaaaacacctgagttgtcatcttccttgttaccgccgtaaggagcatttccgatttctgatttggcaccggttcctttgttggtatgtgcataaccgcagatatggataccgccccaacctttcggctgtttcaattcggaagtcatgacgataggtttctcagctgttccctgagcatcgatcttaccaccctgctctacaagaatataatctgcagcatcatcttctacggctgtgatggtcacaccctcttcgattttcaatacaccgccattctttacggtgtaaccgccacttaaagtgaaagaatttccggctttcaacacaacggtctgaccgttatccaccactcccttcaactctgtgccgttggctactactatttcgtttttcccgttgtctgaaccgtcaccgttattatcgtcgtcgtcatcacaagcggtaaatgtcattgtactcatggatgtcattaacgctaaaaccattaagttcaaatacttctttttcatactttctcgttgttaaatgttaaactgtttgattaaaatttatatgatattcctatttctgcatttgttccggggcggaaagattcaacatccattttcgaatcaatctgcggcacatcctgacggaagcgtactttgctgttcaacagatccttcacggtcagtttggctgtccagtggccaccgaaagagtagcttccgacaaaatccagggtgtggagagccagctgcttgttgtcgcccaattcgaagattccgacagagtggatgcggggtccctgtacattgtagaccaatgccagtatggtcttgttgccgttctgcgctgtcggcgagtagctgacatctgcattcaccaggtaaggggatgcaccttgaagcgcacgctgattgtcggtatagatacctcttccggaaggaagtttgacatcggtgtacatatacgaaccgttcacccctaccctgaaatccttgaagagttctttccgaatttccagttcgatacccatcgccataccgctatcggaattgcggaaggtatgtacggcagaaccgccctcggcttcctgcacccgttcgatggggtcgttcagttttttgaagtagagacttcctgaaaacatatcactgttttctttattgaagaaatcatatcggaggtctacattgatgttatatccgtttttgatattggcattaccgcggacagaggcgctaccataagattcctgatagaggaacggagccatttccacaaaggccggacgggtaacagtgcgtgacaaggcaaaccgtaaactgctctgttcatcaaaggtgtatttcatattgagcgccgggaaaatatcccctttgtccagtttggatgtcttctcgatactggcatcatcggcgtagtccacctgctggttgacctgttcgtaacgtacgcctacattcaccaacaaagatggcaagggatagaaatccagttcggcaaaggctgcataagcttcgctctccgcttcatagcggttacgagcctgatagctccgggtgatggagatattgccgttagcgacattgtcaaaattcagataaccgtccgtatcatagatattgtcgattgtcacatccgacaatttgtccatatcgtaatagaagttggcgcttttaaaatcgcgtgttttccttttataggtaaaaccggcacgcaccttatttttttcaccgaatttatagctgcccttgatatcacccaccgcttcgtcctcatccaattcgctgaagtagcgcatggtctcctgctggttaaggaggaaaagagacaactcgccggtttcctcattgtggcggaacatcacctgacggcggtccggttcgtcactacccgtcattccataagagcctgcccagtcgagttcccaatggctgccaaattcatgatggccgctcaactgattgttgagaagtcggtaggcatggaagatgctgttacttcccttgagagtgatgccttccgaatcaaagccctgacgttcgagatattcgtccacagcattccgggcataaaacaaggtatagttgatacgatcgtgttcgcggaaacggtagttcaaaccagccagtcccgccaccttcagctctgtagtatatttattgtagttaaaatgattcaatgtcgtaccttgggctgtcaactgtttgacaaaggcatcctccagtatctggcggctattgccggcaccgaatgaaagaaggatatcaaaacgtcctacgctttttccccaaccgatattcccgctgaaatcaggaagcgcatttttcttatcaatggcaaaagtcgttccgaacacatcatctttcaccacctgctgtttgaaatcagcaaaggacatatccagataacggtgtttgatattgtctgtagaaagcattgtccccttgtggtcggcatagcggaaatccttgccgagagtattaaaggcacccccaacattcaaaccgacagaaaagaaattgctgtttccctgacttttagtaccgatatcaatatgtgcaccggcataatcagcaaacgtgctggcctgatagaccttgctgaccgtgatattctgcacggtggacgaagggaacaggtcgagcggaatcaacttattgtccggattgggagaagcaatcggcaaaccgttcaaagtggtcgtactataacggtcgcccaaaccacgtaccaccaactgaccggcactggcaatggagattccggtgattttcttcaccccttcctgcacattcgacacacctttcagactcatttccttagcacccagattctcgatagccacacttgcctgctggcgttccatctgcaacacccgctcgttttccatattcttgcgggcctttaccgatacctcctccaacatcgcatggtcggcttccaaaacaaaatcaagaagagtcgtaccgctgattttcacctgctcgcgatgcaactccttatatcctacatatttcaccaacaaatgatacgtacccggctcaacgctcagttcatagcagccgtcgatatcggtggcaatacccaaggttgtacctacaatctgcactgtggcaccgattaacggctcatttgtttctttgtctgtaatcttaccttttaaagttgcattctgacaccatccttgtaaagaagtaaaaaggaccatgcaacatacacaaaaacttaatctaattgtctgcattgaattctattatttttttctcgccgcaaaggtgaggcagaattgtaacagggaaataacatttaaatgaagggaatgttaagcgttgttacgataatgtgacaacaccgggctgcaactcagaggcattgaacgtgtggtatattttttgctacaagaaatacaaaacaactaaaacaaaatagtatgagagctttattatatgtaacattacttgccttaggcgcaggtgcatgtgctacagcccacagctatacgatggaagatgacatctactacgtacccggcaaaaaggcgttggtagtcaaagaggtggaaaagattaccggagaagaatttcctcagaatccaaacacggacgatacatacgcttatgaagcacaccgctcggagggcagcagtgtcgctcccagagatttcacagaggggcagcaacgacgcatcaatacccgtagcggagttgtggaaaatatggacatcaatgccttgacccggcaggctcaatccacacttgccgacaaccgcacggtcaacgagaccatttatgaaaacaccggttattggattggcggatataaaggcaacgaaagagattttgaagagatacaacggattatcaacctgtatcctaacggttttgcctttttcaacagcaatggttatgacatcgccatgaatctgtcgtttgatacagactggaatgtatatacagacaacggccgatactggtggtttccgagcaatacaaacattgagctatactcttccttattgttcggcacctatccgaaatacatctggacaattgtctgggacaatccgcgctttgacaattgggctttcaattccacattcaacaaccgcttcaactggggattcagcttcagctggaactcttcctggtatgacccatggtggggcggctggtatgacccgtggtacgacccatggtgcagaccctggcatccgcattggtatgatccatggtacggctatcaccctcactggggacacggtcactggtgcgacccttggtatgaccgttaccatcccaactggaaccgtccgggacgtccggcacatccgttggcaggccaacgaccgaactatggcggcggagtgagcggcatacgccccaacggacaatcgggccgcttccctacccgtccgacagccggcagacgcccgtccggcagcggaaccatccgcccgaataacggctctcacttcgggacctccggacgccccaaccgcggcaacaccatacgccccaacggttcaaccgtccgccccggaaacaacaccggcaccatgagcagaccgggcacgacaaccagacctgccacccgaccgaacacgggcaatgtgttgcgtccgggaacaagcaaccgcaacaactctaccgtgcgaccgggaacaactaccagaccgtcgaccacccgccgacccaatacgacacgccggccacagacgacccgttcgaacagcagctattcgcgtccgaacaacagttacaggcctacctataacaacaacagctccaaccgtgagacctatactccacgaagaagctctacgggcagcgggactacctccggaggcaacagaccggtgagaagaagataatagaataaaaacaggaaaagatgaaaagaattgcaatcacagctatagcttgctgtttcgcaatagcaacgcaagcacaaaactttgaagacgttgtcagattcagccgccagtcaaatccgggcacagcacgttctgccgccatgggcggtgccttcacggccttgggaggcgatatttctgccatcaccaacaacccggcaggtatcggtgtgttccgtaagtcagaagtgagtttcaccccgcttctcaattttgccaagacagaggccagcggtgagaaaatgaacaaaacagccttccagctgggcggattgggcggagtgctatccctatactcgtccgcattcaactggaaaggtctcaatatcggattttactataccaatctgaacaacttcaaccggaatacacggcagattgttccggtgtccaacaattcgtttaccgatatgctggctctatctgccggagatatagatccgaacaacctggacggatataccaccggtctggcatacgacgcctacctgattaaccgggatcctaaaaccggctactattattccatcctgggagccgatgaggatgtatcgcaggtgaaagacatagaagaaaaaggctatcagggagaatatacccttgccttcgggaccaatttcctggataaactatacatcggtgcaagtataggcatccagagcatttactataaaatgacttcgcaattccaggaagctccggacgtcaactctccctcggggctggactactacaactttttagaatacaaaaagatgaacggcgtaggtaccaacatcaaactgggaatcatctaccgtccgataccggaattgcgcatcggtgccgccatccattctccgacgtggtacagcatgaactataccatgagtaccgctatggactcctacttcatcacccctccgaaaggagaagaagcatataacttctggactcccagctatgaaatggacatagactttgacatgcgcacaccttggagagcctccgtaggactagcgaccgtactcggacaaaaggccatcatcagtgccgattacgagttcatcaaatacaccaacgcccatcttgagaatgcctcggacggatacagctatcggggagagaacgatgccatacagctctatctgcgtccgacccacaatttccggaccggagcagaattccgggcaaacagcattgtaagcctccggggcggatacagtttctgggacagtccgtattacgagacagacaaatcatacaaccgcatccaatcatggtctacaggtatcggtcttaatttcggggcattctactgtgatgcagcattcgtgcatcgctggaccaaaaacgagactgttttctactcctattatgatgcagaagacccctctttggatatcgtatcgcaaccgacacaaaacaaattaaaaaccaatgaggcacggataactttcggaatccgtttctaactcaattgaaaatattatttttgcatcggatttctattttagagatccgatgttttattttacctaaaaagaaggaatccttagattatatggcaaaaaaattctatatcgagacttacggctgccaaatgaatgtggcagacagcgaagtagtggctgctattctgacagctcatggactggaacatgtgaaggacaaaaatgatgcagacgtcattctggtaaacacttgctctgttcgcgaaaatgcagaacagcgtgtacgcggccgcgtacagggattttccgaaatccgcaagcacaatccgcatctgctggtaggaatcatgggctgcatggcagaaagactgggagagaaactgtttgaagaagagaaaaacgtaaacatcgttgtggggccggatgcctatatggatctgcctcttttgattgaaaaagcagaaaaaggagaaaaagccatcaacatcgagctgtcgacgaccgaaacatacaaagatatctgtccgtcgcgtatagacgagacctccatttcaggtttcgtttcaatcatgcgcggctgcaacaacttctgtacctactgcattgtgccatacacccgcggacgggaacgcagccgcagcccgcacagcatcgttgcagaagttatcgacctgcaacgcagaggctacaaggaggtaacccttttgggacagaatgtcaattcatacctatacaaagacgaaaacacagaaatgaacttcccggcattgctggagcgtgtggcatgcaccgttcccaatatgcgcatccgctttgcaacgtcacaccccaaagacatgagcgacgaaaccctggagaccatcgcacgctatccgaatatctgcagatccatccatctgccggtgcaatcgggcagcaactccgtcttaaaagacatgaaccgtaaatatacccgcgaatggtatctggaccggatagcagccatccgccgcatcattccggattgcggcatctcgacagacgtatttgtcggcttccacaacgaaagcgaagaagactaccaacagactcttgccttaatgaaagaagtcggtttcgatctggcctatatgttcaaatattccgaacgtcccggtaccaaagcctccaagagcttgccggacaacatagacgaagagaccaaaggtcgccgtctgcaagaattaatcgacctgcaggtaggctggtcgcttgaaagcaaccgccgggatatcggcaagactttcgaagtgctggtagagggtatttccaaaaaaagccaggacgagatgttcggtcgcagcagccaaaacaaggtgattgtatttccggctaaagacatccaggtcggctcgctagttcatgtcaaagtaaaagattgtacttctgccaccctgatgggcgaattggtggaaaccaaataactggaatatggaaaactttcgcaaattacaaaacgaagaattgcacagaatcagcaccgagcaattcaaacaggccgagaagttgcccgtggtgattgtattggacaatatccgcagtcagaacaatgtgggctcggtattccgcacatccgatgctttccgcatcgaaaaaatctatctatgcggcatcacctccacccccgaaaaccgggaggtacacaaaacagccctgggtgcagaggatgccgtagactgggaatatcaaaaagacacgctgagtgtcatccatcgattaaaggaagagggataccagatatattccattgaacaggcggaaaacaccacttcactggaggatttccacatcaacatgcaggggaaatatgcattggtgttcggcaacgaggtgaaaggcgtgcaacaggaagtaatcaatgcttcggacaattgcatcgaaatccctcaattcgggacgaagcattcattcaatatcgcagtaaccgtaggaattgtactatggcaaaccatgttgccggttttgaaagatatcaagggcatggcaggcaaatagccgccagcccttttatctgttatcgtcttctcatcttttcagtgattttcacggcttccactgcctcccgcacatcatgcacccgaagaatagatgcccctttcaataaagcaagggtgttcaatacggttgtaccgttcaacgcctcgttggctgtgccaccaatcaatttgtaaatcattgtttttctggaaatacccaccaaaatcggatattccaagtccaaataagaatccataccatccatcagttcgtaattgtggtcgagggtcttgccgaaaccgaaaccggggtcaaggatgatattgtcaaaaccagcctcgttgagcatggcaatcctgtcggtaaagaatttacgaacatcttttacaacattctcatagaccggattcaactgcatggtctgcggcgtaccctgaatatgcatcatgatatacggaactcctgatttggcaacaaaatcaaacatgccgtcatccatcgttcctccggaaatatcattgacaatgacatctcccagacaattgattatttcgcgcgccacggcagagcgaaaggtatcaatggacaccaccacatccggataatacttcctcacaagctcaaccgcccatgccaaacgtgccagctcctccttttcatcgacaaaagcagctccagaacgagtggaataagctcctacgtctatgatgcctgcaccctcctccacaatctggtgaatacgttcgattaccttcacttcgctgacatatttgccgccatcataaaatgagtccggtgtcacattcaaaattcccatcacgactggagtggaaaaatcaagagatttcttatttaatgttattgttttcatggctttactttttccttttctttattgctttttttgcataaatttgcggtatcaaaattacaactagtttttatatttcaaagccatgccggatacagcacaagaatatgatttagtaatcgaaacctgccgggacatcttcctgaaaaagatgcaagactatggtacagcctggcgcatattgagacccacctctctgacagaccagatatatatcaaagccaaccgcatacgcagtatcgaagagaagggtgtatgcaaggtgaatgaaggagttgtgccggaatttatcggcatcatcaactactccatcatggggctgatacagctggagttgggcagaggtgaggagacagacgaagaccatgaaaaaataaaggcactctacgatacctattttcagcaagctaaggcactgatgatcaacaaaaaccacgactatggagaagcttggcgccatatgcgtatcagttcgtataccgacctgatattgatgaaaatcaatcgtacaaaacaaattgaagaccacgaaggcaccaccttgatttcggaaggtatcgatgcaaactataacgacatgattaattatgccgtatttgccctcatccgtctgactgtggaaaacgaagtgaattaagcaaaactttcccgatagaattagaatgaatttcataagaaacatctgccgcatattaaccggagtgctctttatctactccggttttgtcaaaggaatcgacccgctaggttcctactataagttcatcgattatttcaatgcttttcacatgagctggatgaacggtagcgccctgttcttttcctttgtactggcattgtttgaattcattgtcggcatttgtctgcttctcaatatcaagacaaagacagcctcttggggcgtgctcgttttcatggcagtgatgacaccgctaaccttgattctggcaatcaaaaatccggtgtcagactgtggttgtttcggagatgctttaacactgacaaattgggaaactttctggaagaacctgatattgctcgtgttgacattgggtatttttttgaacagggacaaatttcgctccatcttcaatgtgctggaacaaagcatactcattatattgggccttgcaggcatgctgagcgttgaattttattgctacagacatctgcccctgattgatttccgtccgtatgccatcggcaacaacatcacggaaggcatgactcctcctcccggagccccacacgatgaatatgaaattaccctgcaatatagaaataggaaaaccggcgagctgaaagattttacagaagcaaattatccctggcaagatacactaaactgggaatatgcgaacacttttgaaaaactcgtaaaagaggggtacaagacccctattcacgatttcaccatcgaacatccggaaaccggcgatatcacagaagaagttttgacagacaacggttatacatttttagccataacctatgatatcaaccaatccaatccaatcaaccaacagcaactaaacagactggccgcctatgcacaagaaaaaggcattcgcttttacggtctgacagcctcggttgatgatgatatccggcaatacaaagacaaacatgcagtgaattacgatttctgcaccgctgacgaaacccaattaaagacagtcgtccgttcgaatcccggactggtgcttctacatcagggaacagtaatcaacaaatggggacaccgagatttaccggacattgaggaattacaagacaaagacttgctggcatacagtctaagcaaacaacaggctgatgccaaccgactattgatatatacttttatcctgggagcacttgcttgtctaggattttatttagccaaaaaatacaataagaggcattaaacaaataaattaatattacacactttaaagaattaatcatgagaaagaaaattgttgccggaaactggaaaatgaacaaaacccttcaagaaggcgtagcattggcacaggaagtaaacgaccgtgtgaaagcattggctccaaagcatgtaactatagtagttggcactccctttatccacttgagcgaagtgaacaaagtggctgatgcgattgccgtatctgcacagaactgcgcaaccgaagtatcaggagcctatacaggcgaagtttctgctgcaatggttgcttcaaccggctgtaaatacgttatcttaggtcactcagaaagaagaagctactatggagagactgacgaaattctggtaaaaaaagtagagcgcgcattggaaaacaacctggaaatcattttctgcgtaggtgaagtattggcagaaagagaagcagaaaaacattttgatgtagtaaaagcacagttgagcaacggcttgttcaatctgtcggcagaacaatttgctcacgtagtgattgcatacgaaccggtatgggctatcggaaccggcaaaacagccacttccgcacaggcagaagaaatgcataagtttatccgcgaaacaatcgctgcaaaatatggagaaactgcagcaaacgacaccaccattctttatggcggaagctgcaatgcaaaaaatgcagacgaactgttttcacagccgaatgttgacggtggtttaatcggcggagcttcattgaaagctgacgatttcatggccatcatctcggctcgcgaaaatcattaattagataaaaggaaacaagtatcgattaacgctcctatcggggcgttaatcttattataaactaaattctacaaacatgaaaaaactactgttagtcctctctttagggattctggtgtttgcatgcaaagagtccaaaaaagaaacaaaacaaagtccttatcaagctctcgctgatcagtatgcagaatttcctctaacaactgatgtcagtaaattgactgaaaacgaaaagaaaatgcttccgttattaatccagacagctgaaattatggaagatatcttctggcaaaatgcttatggagaccgcgatgctcttttaaaacaattcgccggagattcagcagccttgaaatacctggcaatcaattatgggccttgggacagactggatgataacaaaccgttcatcgaaggcgtcggagccaaaccggcaggtgccaacttctatccgaaagacatgactaaggaagaattcgaagcgctggaagatcctcgtaaaaccgactggtacagcgttgtacgtcgagacaaggatggaaaattaattgtgctttccttccatgaagcctatccggaagaggtaaaaaaagcagcaaatttactgaaacaggcagcagaactagcagaagacgaaggtctgaaaaaatatctgtcattacgtgcagaagctcttctgacagatgactacctggccagcgacttagcctggatggatatgaaagacaatacactggatttcgttgtcggtcctattgaaacctatgaagaccagttatttggatacaaggcctctcattccggacagattctggtaaaagacaaagactggagcaaacgcctgtcagtatatgcacaatatttaccgaaactgcaggaaaatctgccggtacccgatgcatataaaaaagaaaaagctaacgctaacccagacatgaatgcatacgatgtgatttactacgccggagactgcaacgcaggaagcaagaacattgccatcaacctgcctaacgaccctcgtgtccacgcagccaaaggaagccgtaaattacagttaaaaaactccatgcaggctaaatttgacaaaattgtcgtgccgatttcaaaacttgtcatcaatcctgaacaacagaaatatgtcaattttgatgcattctttgaaaacaccatgttccacgaagtagctcatggtctgggagtaaaatatacactggatggcaaacaagacacccgtgcagccctgcaaaattactatacttcgatagaagaaggaaaagcagacatcttaggtttatattgcgtaaccaaactggcggaatggggagtgattaaaaacaaagacctgatggagaactatgtgacctttattgcaggtatcttccgctctacccgtttcggagctgccagtgcacatggcaaggccaacatgatgcagtttaaccattttatggaaagcggagctattacccgtgatgcaaataccggatattacaccgttgatttcgacaaaatgaaaaaagacattgaagtaatcgcaggagaatacatcaccatagaaggagacggtaatattcagaaagctgcaacacttgtcaacgaaaaaggtattgttaccccgacattgcaatcagaccttgaccgcatagccggagccaacattccgaaagatatcttcttcaagcaaggcaccgcagtattgggattgtaattcctcaaaatccatagaaaaaagaataaccttcggttctgattgtaccgaaggttatttttatatcacttattttccataatccaacatctggcagagaaaatcatccggatattctattttaacatctacaattgccccttcattcattacaggcttataaaccggattaataaaaccggcataaggagctacgcctaatttgcgataacgttccagcacttcaccgtgcagcgaactgtcgaccttcacaccataagtctcaatcaatgtacgggcagccttaaaatcaccttcggatttaatacgctgcacttcagccaataattcaccaaataaacaacgcagaccttcataatcatgaatcatgaaataagtcttaccatttcgcccgatacgctcgatgataccttgagttctacctttctcgtatacccaagcagctatcatctgacgattgcgcatatgggactcttccaattgattacccggcaaaatacgtgtcaactgaaccatcagtccatttcggatataactgttatattcggccttagcaacttccaaagaaggcataatccctaaatccaccatcttcgggtccattatataatataacgcaaacaaatctgcccgcgcttcctctatggtcgaataataattacgcaaagcttccgaggtaacacccggcaacatcttcccggaaccatgcccaagacattcatgcaagtcggtgtgcagactacttcctaacgacccaaactcgcgagccaattgaatttcttcatcactcgctgcaaattcatccaaaacaccggaagagctggctgccatatcataggcatacgttatattgtccaatgtcactgatttactgccataacgttcacgtatccactcggcattaggaagatttattccgataggcgtggcaggatggcagtctccacctaacatggctacctgcatgacacgcgctgtaactccttttacctcagactttttaaaacgactatcaatcggagcatgctgttcaaaccacaaagcgttatccgccaatttacgggtgcgctcgcaagcctctttatccacaatttccactaccgcttcccaactggctttataagccaaagcatctccatagacctctataaaaccgtttataaaatcaatggatgattctgtatccttgagccactctatggaatactcatcaaataaatgcaaatcccccgtcttgtaatactctatcaataaatgcatagccttctgctgttgtaaggtacacgcaaaagacagagcctgttccagccaatatacgacactctccagttctttactgtattttcctcctattttccatacctcttcacggataacaccatcttccccttttatcaaagtagagttcaatccataagaaacggagggttgttccccattaccgacagacttgtaaaaagactctacctctttctgagtgactccgacataataattattggcagagccgactatcaaatccttatcagcatccaacaagactcttttggacatatattccggatcgaaaattattctttccaactcctgcccttccttttcacatccgacagcacgcaataattcttgccaataagcctgcgtaaaacaaggcttgaatttatccatagagtaatgatgatgaataccattggcaaagaacactttcttggcataaaccataaatgcctgaaagtcctctgtagtcctatcgccctggaaatcattaatcacccgttcaagcacccggcgcaaacgcaaattataacaattattctgatcccataaaatatcccgaccagccaaagctgcttgactgagataataaataaaaatccgttcacgcgcactcaattgttcaaacatcggaacctgatagcgcaaaatctttacatcaccaaactgttccgtctgccaacggaatccttctgcctctttcatcattcattatatatttaccgattaaaacgttccaatatttcatcagaagccttgatggcattgcaataccactgaaacaacacttcatcccgacgcagctctgaaagatgccaatcaatgtcactcgcacgcaaacgccgcgtcacactatacattaccaaagcagcacaaacactgatattcaaactctccgtaaatccatacatcggaactttcacgaattcgtctgcttgtgaaatcaccaaatccgacaatccagtcaactcagttccaaagaagaaagccatcggaccccgctctaaatcaaggtcctctatcaatacatcatccgtatgtggagtggtggctataattctataacctgcggcacgcaaatggtctattgtttcctgtgtattattttccaacttccgatgccggtgaagcgtcagccactctcttgccccttgtgaaaccgtagaggtagaatcataatgattcctattctctatcaaatgtacattctgaatgccataacaatctgcagaacgcatcacagcactttggttgtgtgactgatataaatcttccaatacgactgtggcataatctgtcctttcctgtatcaggcgatcgaataaccgattcttatcatctactacaaattctcttaaatatgttacctgttctttgatcgtcttcatgctgtttatttattatttaaagcaaaatacttccacaaaggagctacatgcatggcttgtatgatcttcccatcttctaacaaatgtctcacgacctccggctccattaacacaacggcaatatcttctgtaggctccaaatgacgctccattaccttttcaactcctgttgctaaaaaacagtaagtatagttattatgagttcctggatttgcactcgccttcatgtataattgccaactaccattaccatagccggtttcttccaatagttcacgtctggcagcctcttccggatttgcatccgtatcatctacaacaccggcacaaagttcataatccacacgccccagtccatgacgatattgacgttccatcaccaattgcccatcttttgtcacagctattacgcaaatccatgccggatattccagaacataataagacggaatcacactgccattgggcaactgtaccttatccttccgaactgtaaaccaaggttcgtgagctatatattcagatgaaatcactttccaattctcaattttatgcaccatatctttactccataaaaatgaaaaagaaggggtgtttatccaagcaccccttcttctataccaaagttacaattagcatttctctgctaattcagcacctgctttaaatttaataattttcttagccggaattgtaatagtatctccagtctgcggatttcttccagttctttcacctctttcagttacagagaatgttccgaagccaacaagggcaactttgtctcctgcaaccaaagcatctccaactgttgctacgaaagcctcgagagcctttttagaatctgcttttgtcaaacctgctttttcagcaattgcatcgattaattgagctttattcatgattataaaatttagggttagaacttcaaaccttttatctattggcaaatgtagttattttattgaatgaaacaacagatttcaccaaaaaatatataaggagcaaataatttatttctccttcacaatcagacactatacaattatattttcagcgcatttttcaccatccattgctgctgaaataatgcctcctgcatagcctgctccctctccacaaggatataatccaactatctccggatgcatacactgtgcatttcgtggaatgcggacaggagaagatgttcgggtctctacgcctaacaataacgctctgtctgaaacaaatccaggtgctttatgaccaaattgtgataatcctattttcaatctgttgcacaaaatatcaggaaaccattcactgataagagatgcctttattccaggtttataagaagtagatggcaatactttaccctcttttcctgccaagaaatcggtcaacacctgtgccggcgcatataagccacctccaccttcttgccaagcccgtctttccaaagcttcctgaaattccatgccggcaaacaatccctcataattcattgcacgcaattcctcttgtccgacagaagtgaccattgcagaattagcccaaggagtattgcgagcagaagaagacattccattaacaacctgctgctcctttccggtagcagcaggcactactacgcctcccggacacatacaaaacgaatatacaccacgcccatctacatttgtcacaaagctatactctgcagcaagcaaccatttaccacgtccctcagcagaatggtattggatgcaatcaatatcatgctgcggatgttccaaacgtaatcctacagcaaaatcttttgcctccaatgccacatgacaacggtacaacattctatatacatcacgagcagaatgtcctgtagccaaaatcacatgttctgcagcatactctttattcccggcaactacaccatacacctgcttttcccgaatcaacaaattcgtaacctttgttgaaaaatggatctctcctccacacctttctattgttttacgcatgtttacaatcacgcccggtagtttatcggtcccgacatgaggatgagcatccaccaatattttaggatctgcaccatgaaataccaagatttccatcgcacgccgtacatctccacgttttttagaacgtgtaaataatttcccatccgaaaaagtcccggctccaccttccccgaaaccaaaatttgaatcttcgtctacaatacccgttttatacaaactatttaaatctctctttctatcttctactgctttcccccgctccaatacaaccggtcgtaatcctcgctctatcaaacgtaaagcagcgaacagacctgccggtcctgccccaatcacaactaccggtttggcattactcacatcccgataattcgattcaaaaaccgtttgctgatgctcttctttatcaatatgtacccccaatgtcatattaaaaaccacctcttttctgcgggcatctatagagcgacgcactacatccacacgacaaattcgctcggcagctatctttaattcctttgctgcatatctcttcacttcatattcgtcccctgcttcacatgggcgcatcctcacttgaatttccttatacataagtatatctgttcaatctatattattcctaaatgctttaatacaatctttgcataaagcgaaaataacgtttttcattcttttctcaaaatacggtttagaaattacacgaaaaagcataaatttgaagcactaaatcttacaataatgaataaaatagcactcatcaccggagcaacttccggaataggacaagccacagctcttaaagctgctgaggcaggatttgatattatcataacaggaagacgggcagaacgtctggaaacacttgccaaagaaatacgcaataaaggagtagatgtcctcacgctcaattttgacattcgccaagctatggaagtagataaagctatcggcagtctgacagataaatggaaaaatatttccgtattggtaaataatgctggtcttgctgttggagtaagccctatccaagaaggcattcttgacgactgggaacgtatgattgacacgaatattaaaggcctcctttacattactcgtgccgttgcccctcttatgatagcccaaaattgcggacatattgtaaatcttgcttcaatagccggtaaagaagtttatcctggaggaaacgtatattgtgcaactaaacatgctgtcgatgcactatctaaagcaatgcgcacagatatgttaaaacataatattaaagttacaaatattgcccccggtatggttgaaacagaattttctcttgttcgctataaaggagacgcagcagcagccaaaaatgtctataagggactcacacctctgacaaacgaagacattgcagacacgattatatttgccattacacgcccggcacatgtttgtctgaatgatatcgtaataatgcctactgcacaagcaaattcaagagatgtaaaccgaaaataagaataaagtacgagagatggtttaatgccatctctctatttaatcgagtaccaaaccaaacaattgcttcaaatcgtttacaacgggattcaattctacaaaatgctcgaatttttcactagaggtataatatctcttcgcttcagtggtcactccaacatcaaataaatcaaaatttaatgcgataaatccgttattaagaaatttcattaaagaatgatggaaatgcatctttataccttccaacttatcaatttgcaattgattatctactaatattgttatttgttcgccctgcacaagtggctgatgagatttcaaagcaataacaaccatttgctctggcttatattctataatataacgctcaaaagcagccatcactttagcttcatttatagcttcatgggccactatcttctcatgcttttcttcctgctgttctctcacaacaaccggctgctcgtgcaacatttgagaataagtatcttttattttaaaagaagataccggccgagagcgaactggagaactactctgtactttaggagtatctgcagccttagcaactggaactttagaaactgtttcaccaaatttccccgtaaagccttctattttcaataaggcaaaaaattcagaagccctcaggcttttttttttaattcattaatttgacataaacggataaaggctatctctacacacaaccttttctccatccttactttatattgtatttcacattgctctataaccttcagagcctcatacaaaaaatcaatagtacatacctttgcttgttctgcataccgtgctttaattgttgcactaacttctaataattgaaccgttgcagaatcttttgccaccaaaacatctctgaaatgctttcctaaacctgcaatcaaatttccggcatcaaatcccttttcaataatttcattcaacagcaataaagcttcgggcaccttcccattgaaaaaataatcagtcaaacgaaaatagtaatcataatccataacattcaaattctcgattaccccttcgtaagtcaaatttctaccacagaaactcactacttgatcaaaaatagaaagtgcatcacgcatcgcaccatctgctttttgtgctataatatccaaagcggcttcgtctgctattattccctccttggctgcaatatattttagatgctctacggtatcaccaaccttcattcggttgaaatcataaatttggcaacgcgaaagaatcgtcggtaaaatcttatgcttttctgtcgtagcaagaataaaaattgcatgtgcaggaggttcttccaatgtctttaaaaaagcattaaaagccgatgtacttagcatatgcacctcatcgataatatatacgctatattttcccacttgcggtaagatacgtacttgatcaaccaatcctcgaatatcatcaacactattattagatgcagcatctaattcgtgaatatttaacgatcgccctgcattaaatgctttacatgattcacattcattacatggttctgcattgggctgcaaattcatgcaatttattgttttggcaaaaatacgagcacaagtcgttttccccacaccacgtggaccggcaaaaagatatgcttgtgccaactggtgattcataatagcattacgcaatgttgaagtaattgccaattgacctacaacagtatcaaaactagcaggtctatatttacgagccgaaactataaaattatccatactaaattatttctatatctttcttggctatccatccttcatttccatcagccaagcgaatattataccagtcacccaattcttcaacaatacgaactttcaatccttcatgaattaaaaaaagactagtaccactatcattgggagcaccttttacagtcacactaggagctgtaataattgcatattcccgttgggaaatacgattattttgcttagcagcaaaatatatcgaacctatagtaaagaagaacataacaattccaacaataaaacccactttctttatggctatggaacgggaataaaaaaacagagttgccattatcaaaaatatgacaaacagcataactgaaatatatccccactgatcagcagaaaaagcagtttcaagacttttataccaccttactaaaaataattcaggcagcacttctattttatcaacaattgccttttgagccatctgcaaattgtaacgcgttgatatatcccttggatttaacaacaatgctctttcataattgataatagcatgagtattatcccctaatttataataacaattacccaaattatagtataaatcagacgattctttaccctctgaaagtatcttagtataaatatcagcagcttctccataacttcccgccgcatacaattcctcagcttgcttttccaaagaggttgctgcagcaaaactattgataccgattagcaataccgttagaagcaataatatctttttcatcatctctttgcttataaatttttatccaattttgttatcacctcaatactctgcgtatatactttatccatttcttgtgctgaactactaccaggagcataacgagcatattcacaagtatcaagcactgcaataaattcttttatctgttcatcaaccacattcttgcgcatcagaatatcgcttatattatctcgattcaactctgctcgatcaatattcaatttataactcatgtacccccacaaagcctttaatatctcatcatagaattgttctgcattgtgatttttcattgcgagagctgccaactttaatctctttcgagccatccttgttgctgcacgatttttaactctagcgacatcagcatttgctttaatacgttgacgatttacaagaatacccacaacaaaaagaagagctggaatcaataaagacaaccaataagtaaacgttccaaaaaactggatacctttggccttcaagcccaaatctccagactttaaataacgaatatctgcacccacttgacgaatatcttctttcttaaaagattgtactacacctcctgcatttccattcgtttttcctttttcagctcctttacgaacatgaattgaatattctttacccagtatcgtcttataagtatttgttttagaatcgaaataagaatagcgtacagcaggaatcttatagtcgccagaataacgaggaataacgacatattcaaaagataccgaaccagacaatccattttctgtaacatttacattacgcaattctttagggtcataaacctcaaaatctaatgggaaatttacagaaggagcctgcattaatttcaaattaccattaccttgaaaagttaccttatacataatcgcatcatttgcactaacagtatcggcagataatgatgttgacatcgtaatatttccaaccgtcccagaaaatcccacaggcttatcattctgaggcaaacctttaacagttattgtcactggcttactcctacgcatagcacgcacatcacgataatttccaaagaaatcatcaaaaaagccatgaccacctcctgctaatctctggcgaacaatacattccagttcaaaaggctctatggttatttcacccgtatgctgagggaacagcaataccttgcgaataactcctacatcatatatttgcccgttgtaagtttctcgaaccaattcaattcgctgtggtgtaggtatttcttctgctaaaaaacctgtaaaagtagggaatttcgtacgtccaaaattagaaagtccaactttagaatacacttttattgtggcaaccaaactttctcccacatacaaactacgttttgaagcgtcaacttttacaaaaagattattttcagtaatagcagcagaaccattttgttgaccagaatgctgacctgattgcgcattcgaagcattggaattactactaccttttattacttgaatcgttaattcattggatttatattgcttaccatcgacagttattgttgctggaggaatcgtataagtaccctctttcgagcccaacatcagataagtgtaaataaaagatacactttgtgttgttttaccattaatcatcgagaaagaagaagactggctagtattcggtcccatcaataattcaaaaccttcaaaagtaggcactttcagatttgaagcactccgattaactgtataggataatcgaaactgctcccctgttgcaacgactgacggtgcagaggctttaaactctacgtcttgagagtaagcaaagctggcaataaacagtaatataataattccaaatattttcatctgctttcaattaaattctacttccaagttgcaaaattaccaatttttattaatcttcattcttttggctttttgctcctgcgctttttgtttttggaccttctcctgcacattcttttcatcttgttgcagagcatctaacaaacgttcagcatcctctttagaaatttttccttgttgctcttgaggttgttggtttggttgattctgctgtttattttggtcttttttatcttgctgctgttctttatcttgattttgtttgttttgctgatcgctattttctttattttgttgttctttattctggtcttgtttgtccttgttctgatcttgttgatttttctcttgattttgttgatccttctgatccttatttttatcttgattttggtcttgtttctgttgattttgctgattctgttgctgtttatgacgagcaaattccaaattatacttggttgcttcggatgttggattatttctcaatgattccttatacgcttcaatactttcattggttttctccatagctagtaaagtattacctatgttatgataaatctctcccaatcgttttttatcgttctctttttcagctaacgcagaaaattgttttaaagcctcatcatattttttttgcttatacaaagcatccgccatattaaaagcagcttcaaaagaattctcttttttagcagcggctttacgatattcaacctccgctttttcaaaatcttgtttattaaacaattcattaccttcgcgaatatacttacgctcctgctgcgcccatgctatgttcattccacaaacaagcaccagaactaatattacaattcttatcataacatttaccatttagcatcaatcatttaccctctcttttaaagatatttatcttcatgaggcgtttattccttctccctaaaatcatgaattcaacaaaaataaagaacaagcctatcaaaataaagtattgatatttctccgcataatcggtatataccttctcttctaatatactcttctccatttttcctacttcatcaagcaatctcgataatcccacatccgtattacttgcacgcacatacattccttctccagctttggctatttcctgcaatgtttgctcatccaacttagaaaccactacattcccactaccgtctttcataaactgtccaggattacccttctctgggataggagcgccttgttccaaacccatcccaattgtatggatagtaatacctttttcatgagcgacacgagctgctgcaacggcatcatcctgatgattttcaccatctgttattacaattatagcttttgaagtttccgtttctggagtaaaagattttgcagccaaatctatcgcagccccaatggcagttccttgaaccggcactatatcagtattgatattcgaaagaaaaagtttagcagacgaataatctgttgttatcggcaattgtacataagcatttcctgcaaaaacaatcatacccactttatcatctgacaatttttcaaccatacgagaaattgccatttttgctttttccaaacgattaggttttatatcttgagccaacatagaattggaaacatccaacacgactatcaattccactccctgcttttttatctgttgcaacttggagccaaactgaggtccagcaacaccaataatcacaaacatcaatgcaataagaatcattacaaatttccatgcccctcgcttaaaagataccaatggcatcaaaggttttagtaattcggggttcccaaactcagctatagcctttttcttcttattgaccatcactatataaaaaacaataagtaacggaataacaagcaaaagatataataattctggatgtgcaaatctaaacatggcaatacatctttaatttaaaccaactacaaaattctaaggaatcttccttaataaagtataacgcaatacagcctgagctattaacagacacataccaatcagaccaaatacaaagtatttctcatcttttttactgaaatgcttcacttcaatcttacttttttccaattggtcaatttcctgataaatctgcttcaatttatcattatctgttgcacgaaaatattgtccaccggtaagagttgctatctgctgcaacacctcttcatcaatctcgacaggcacgttctgcaactgcactccaaaaggagttgcaattggataaggagcctcaccataagtaccaactccaattgtatagactcgaataccatacgttttagccaattctgcggccgttgcaggagctattgctccacgattattaacaccatctgtcaataaaataatcaccttagatttagcagtactctcttttaatcgattaacagcatttgccaatcccaatccgattgctgtaccatcttcaatgattccactcttcacatctcgcaaaagattaacaagcacagcctgatctgtcgtcaacggacattgagtaaagctttccccggcaaatacaactaatcctattttatcttgaggacgttccaaaataaacttagttccaacttccttggcagcctccaatcggtctggcgtaaaatcgcgggccaacatacttccagaaacatcaagagccaaaacgatatcaataccctcgcttgtataagtctgccaactattatttgcttgaggccgagccaatgctatcaccaaaaacacaattgctaacacctctaaagcgaacaggatatgcctcatccaaatacgtccagaatgttttattcccttaaaagcacgcaaagaagaaaattgtaaatcggcatgcgatttcttttctcgaaaaacgtaccacaaaatcattggtatcaataataccaacaatagaaaatatttcgggtttgcaaattcgaatccaaacatcttacttcatttcactattattattaactccggcaacatctgttgtttgcttttcttcaatctctcgtaatttacgttcttctgcctcctttttctcttgctctactttttctgcctgcaaacgcagatgagttgtatttacaaaatcatagacagaatcaagataacgggcactttcatcctgtaagggagtgaacttagcaaattttacataatctgcagttgtcaataaatctgcaattttactgcattcgccagaatttatcttatcacactcttgcatggcttttaaagtttccgtcgaagtttgttccatggcagaaataccaaattcaccatctaaatacgcacgtacggtgtcagtcaaacgagtataatattctttttcccgacctgcctgccaaagtttttctctcttgatttcatccaacgactgcattgccaacacatagggaggaattatttccttttgaggagtaaacaaaggcttatgctttttatatctccgccatagaaaccacactgccaccactataacaattcccagcaaacaccaaagtatatatggcaaagcctcggaaaaagtccatggtgtagcataaggaagtacaatatcataattccctttttgcggatccacttcatatgtatttactgcaaaccctacaggatcagtacgcaaaacattattaaactcatcactttcaattgtaataggcatcggaggaatcacatacatacctgtatcaaaagcagtaattacatacttctctctatataaccatctgccatcattttccggaacagaatctctggacggtcctgaaataatctcaacaccctgcactacagtatctttcaattgcggaaacacaatttttattcccggtgcacttctcactttaaacgtcagatgttgctgatcgcctatcaatatatagtttgtatccaactccaccccatactcaaaatcttgagcattcagagttccgatacataccatcaaaaaaatatataataatatctgcttcataagaatcgatttttcaatccgacatacactaagctctttttttgaacaacgtcatcaacgctctaacataatcttcatcagcacgtatattagcgacatctactccggcccgtttaaaagtcacatctaagtctctttcccaatcagccatatatttcgcatacccatctcttactttttgatccgaagtatctacccacatttgctctccagtctctgcatccgtcaaaaacatcatgcccaccggtggcaatacattttcacgcggatcgtaaactcgtagcgcaaccacatcatgctttcggttagcaatagccaaggcatgagaaaaattattttcatccataaaatctgacaataaaaaacaagtgcaacgtttcttgatagaatttgtcatatactgtaatgcctgctctatattcgtctgtttatcttcaggataaaaatcaatcaactctcggatgatatgcaaaatatgagttctaccttttttaggcggaataaatttttctatcttattagaaaaaaagataacaccgattttatcattattttgaatggcagaaaaagcaataaccgcagcaatttccgttatctggtttttcttcaatttagttacagtaccgaaattacgagaaccactaacatcaatcatcaacatcacagtcaattctcgttcttcctcaaataccttgatatacggtttattgtgacgagcagttacattccagtctatattacggatatcatctccatattgatactctcgtacctcgctgaaagtcatacccctacccttaaaagccgagtgatattcccctgcaaatatatttttagacaatccccgggtttttatttctattgtccggacccgctttaatagttctgaagtttccattttctatcattcatcgttattcattcatcaaaattctctgcaacagtaaaagcatctgctaaggaacttctactgcattcagaatttcattgatgatatcttcgctagttatattatttgcttctgcctcataggttaatccaatacgatgccgcaatacatcatgacatactgcacgtacatcctctggaatcacataacctcttctcttgataaatgcataagcttttgctgctttagccaaagaaatactagcacgtggcgaacctccaaaagaaatcatattggtaaatttatccaatccagcctcttgtggaaaacgagttgcaaaaacgatatcaataatatacttttctattttttcgtccatatacacatctttcacaacctcacgtgcccgaacaatatctgccggctttaagattgttgtagcttttggaaatgatttttccatattctgacgaacaatcaatttttcttcttctttcttcggataatcaataaccaccttcaacataaaacggtcaacttgcgcctctggcaatggataagtaccctcttgctctacagggttctgtgttgccataactaggaatggttcttccaatttataagtcatatccccaattgtcacttgacgttcctgcattgcctccaacaaagccgactgtactttcgccggagcacggttaatctcatcggccaaaataaaatttgcaaaaataggtccttgcttaacaacaaattcctcacgtttctgtgaatatatcatggtaccgataacatctgccggtaaaagatctggcgtaaactgtatacggctaaacttagcatcaattgttgttgcaagtgtattaattgccaacgtttttgccaatcctggtacaccctccaataatatatgcccatttgaaagcataccaattaaaagaccttctacaagatgcttctgtccaacaatcactttgttcatctccatgttgatcatatcaacaaaagaactttcctgctgtatgcgctcattcaacgattttatgtcaacagtatccatcactttaaattttatgtgttatatcattatttatttcctattacgtaatctcacaaaatttgttttaccaaatttctctattttctttgtctaccgccaaagttaggaattcatatcccaaatgttaaataacaaagcgttaaaaatttctaatcatccatttaaggttttgcaaaaaaataagcaagtctatttggagtttgtccgatgctcctttaaccacttccctatcctgacaaacaaaatgtaaattgtgaatataaacactaaacaacgcaaagccacttgtacaacatcacactcctccaatgactgaaaatctttccataataaaggtaacatataaaacaataatccactcaaaataaccacctgaacaatcatccaccacttacggggaatatcccatatggattttgttttatttattttatattcatgattttctgaaccttctttcaatcgttccctcgcccgacaaaccagtaatacaataaatattccaaatgcaactaacatcaatgtatctaaattcatctcccaatatttttcgttattaaatttttatggatcaacgtcacaaaacactctaactgtagccagatcttttaattttttcattgccaaaaaattttctttcaaaattttttttacagcgacacatgacgttgcaggctcaatcttcaataaaatcaccaaacgatatactccgccaatacgcccaacctctggcactgccggtccacagacacgatgatttaatttttctctcaatttaccagccaaccaatttgcagaattccgcaatacaacaacatccttatgtctcaattctacttgtatcaaccgcccgaatggaggatacataaacaactgcctctcaactgacaattgccgaaaaaataaagaataatctccctcctttaatattttatacactcgattattgacattagaagcttgaatcaccaccttcccctgttcccctttacggccactccgaccactaacttgcattagcatacaaaatgaccgttcttcagctcgaaagtccggaaaattcaccatactgtcagcatccatgacaccgactagcttgacattttcaaaatccaaccccttagtcaccatctgagtgccgatgagcacatctgtctttccttgctcaaaatcatccaccacatgtctaaaacgactcttgctactcattacatccaaatccatccgagccacccgacattccggaaatagtcgttctacctcttcttctatgcgctcagtgccaggcgttctctctttataatgcccagttccacattctgaacaacattgccgcatcggtattatagcaccacaataccgacaaaccaacacattacgttttttataataagtcatacttacatcacaatgcttacatttaggtataacaccacattgctcacattgtacataagttgaatagcctcgtctattttgaaataatatcacctgctttttatccgctagtgctttccgcatctcattcaccaaaagaggagaaaaacttccctgcattatcttctttctccgacactctttcatatcctccaccacaatctgaggcaaagaaacaccaccataccgctgattcagctcaaccaatccatatttaccactaattgcatgttgataagattcaaacgaaggtgttgctgaacctaacaaaacttttgcaccatgcattttagccaacataatagccgaatcccttccatgatatcgaggcgccggttctttttgtttatatgatgtatcatgttcctcatctataataatcaatcccaagtgcgaaaaaggtaaaaacacagatgaacgcactcctaataccaaccctaaaggtttatcactacactgcttccgccacagctcagcccgcatttggtctgacataccagaatgatacactccaatctgatctgcaaaagcattctgcaaacgttttacaatctgcactgtcaaagcaatttccggcaacatatataacacctgctcacctcgagccaaacattcctttatcaagtgtatatatatttccgtctttcctgacgaagtcacacctttcagcaagacacaatctttctctcgaaaatagccatgaattttatttagagcaccactctgctcttcagataattcactaaacttagcaacacctacttgttgccccaatctactcaccacacgctcttgcacacacaaaatctgcttttcacataaccctttcaataccgctgcactccccccagttttataaaggaagtccacacgctccatttcctcttttccctcctcaatccacttgcatagcatcttatattgtgaaggagcccgtttcagaccatctaatattttgcctagctcaacttcactaaaatgtcgttgccaacacacaaaagccatagttttctcccgaaacatttcatcgacagtctctttgatttgtacatacttcttagacaaaagagacttcactacattcatcccatttcggatttttaggtacttctctgcatctttcaacgccacatatgcattaggttgcaaaaattccaacaatgcccgttcattattcgtcaatacggcataatcaatctccacttcagtccttactacagccgtataactttccaaacgaaaggctattggcaaagcagccttcatcacctctcccacagttgccatatagtaattggcaacccataataaaaatttaagatgcatagctgacaacctgacttgctcttctgctataccctctatcaacttcacttcatatccttcaggcttcaactcatgcatcctcatcaccaatgccgtatattttttgttcccggcaaaaggaaccaataccaacgaaccttcctttatcatacccacaagagtatcaggcactgcataggtgtacacaccatctacagcaaggggtactataacgtcggcaaaccacattaaacagacagaaccctaaccaacgacaacaattctggattcagattctttgtatgttttattgttttattaaaaggaacatgaacaatttctttattcataattcccaacatgatactcttctgatcatccattaaagcatccacagctgcaactcctaattgacttgccaacactcggtcgaactgagatggagaaccaccacgctgcatatgtcccaacacagacacacggatatcataatcaggatgcttttgtgcaactttttctgcaatattataggctcctccagatttatctccttctgccacaatgacaataccacttgaatttttagggttataatccttttcaataaaatgatacaaatctgtcaaatcagtttcaacctccggcaccaatactgcttctgccccagtagcaattgctgtacgcaaagcaataaaaccagcatcacgtcccataacctccacaaaaaacaaacggttgtgtgcactagcagtatccttgattttgtcaacagcttcaatagctgtatttacagctgtatcatatccgattgttgaatctgtaccgtacaaatcattatcaattgttcctgggattcccacaataggtatatcatgttcttgaaccaaacatttagcacctgtaaacgaaccatccccacctatcaccacaagggcatcaatctgatgttcagctaaaacctgagcagcctttgttcttccctctggagtacggaactctacactacgagctgatttcagaatagttcctccccgctgaataatattgcttacatcatgagaacgcaatctttttatttcaccttcaatcaaaccttgataaccgccataaataccataagcctcacaaccattaaaaattgcagcacgcaccacagctctaatcgctgcattcattcccggtgcatctcctcccgaagtcaggactccgattcttttaatctttcccataatctttataagtatttgtaaatctattgtagttctattttatgttgtatgtcctccataatccaccgtggtgttgatgttgctccactgattccaactgtttcagcccctgcaatcatctctggacgcaaatcctctacactttgcacaaagtaacttcgaggatttatctcttgacaaacggcaaacaactgcttcccatttgaacttttctgcccactaacaaaaatcaccacatcatgacgtccggcaaaatctcgcaactgcggtattctattcgccacttttcggcaaatagtatcgtgaaccaccaccagatccccccccctttccttcaacaaatccgcaattttctgaaagccttccaaacttttagttgtttgtgaaaacaatatcacctgcctgctaaaatcaatttgttttatatcatcctccttctccacaaccaaagcctctccattggtttgccccaccaaccccacaacctctgcatgtcctcgtttaccatatatcactatttgccctccttctttccgagtttgttcaaaggatttacgtattctttcttgcaaatttaataccaccggacacgatgcatctataatctctataccattttcatgggccgtctgataagatacaggaggttctccatgtgctctaaacaatacccgacaatttttcaatctagcaaaatcatcatgctcaattgtttgcaaccccattgccttcaaacgctccacttccaagctattatgcacaatatcaccgatacaataaagagctcctttctccaactcctgctccgcttttcgtatagcatttactacaccaaaacaaaaacccgaatgttcatctatctctactttcattctttaaactcttataacgtcgtgcacttatcttccctatctcctggactcaatgactttcaccatcatttcaacctcctcctcaatcgtcatacagctattatcaacaactacagcatcttccgtccgaaccaaaggactcacttcccgatgagaatctatataatcacgtttttctacatttgccttcacctcttcataactcaccttcactcccttgtccttaagctctttaaatcgccgctcagctctcacgtcaggagaagccgtcatgaaaaacttcacatcagcatttggaaatacaacgcttccaatatctcttccatccataataacactttcattttgcgccatttcccgctgctgtgttaccaaaaactctctcacaaaaccgatagccgccacactacttacatgatcagccacttccattcctcgaatatagctttctacgttctctccattcaaataagtttcataacactttagctcttcattgtatttaaaacttatttttattttattcaaacacttacgcaatgcctcctcatctatctgacctgccccatctattaacttgcatcgcaaagctgccaatgtcaccacacgatacatggctccagtatctatataagtcaatcctacacgagctgctatcaacttagctacagtacttttacccgtggaagaatatccatctacagcaactatcataaaccttaacttttatcttaaactcgacaaagatataataattttacggaaacaatccatcatatttgttacaataagataaaaaaacgcgcaaccgatagcattttcccttctatacctctacaagtttgcagacatctatccattcttgcattttagaatattttgccaactcatctactgacaactcaacagcactacttccggttccggcagccggataaacaatttcaaaacgcttcaatgaaacatccaaataaactttcaccccctctggtatgacaaaagggcacactcctcctggagcatgccccacatatttttccacttcatcaaaaggaatcattttagctttttgatgaaaaaattccttatattttttattatcaatcttcacatctccggctgccacaatcaatatagcctcattaccaacaaaaaaagacattgtcttagcaatccgtgccggctcacaaccgacagcaaccgcagcagcctctactgtcgcactagattgagacaaaacctttacccggtcttccaaaccaaattcatgaaaatattgttttactttttccaacgacatgacaagaaaactttctatttagcatatcaaatataagcaaaaactctcgataaaacaatatcccaaaacaaatcactcatctttcgacaaactaagatctctatccattccaatatttctattggcaataaaaaaagctgtcctcgaaaaaggacagcttctcgtctaaatttattaaaaaaggattagtttatcattttcatcaattcactggccaattctttcatggtatcactacctgactttgccgccaatttgttcgcaacagaagcataacgtttagcaacatcgtaaaagccacatttttgagaaatcttcacataattacaaatcgcatcaaaatcagactgtgattctactgtttttcctgcccacaattgtataactttcaaacgggacacatcagtcataatttctaatgcaccagcagtaatttctttaatcatttgacgattttcagggaaataacgaaacaatttacgcgccttataaaaataatcttctgcatttttatctgctcgcaactgacggatataaaaataatctctcactacatcataatgctcatatccgccttcttcgattttttttaaagaagcctcataatcattcttattctttttatataattgctccaaatgatttaccaacacattatccaatttctggaaaacatcatcttttgaaaaaagttctacaaacttatcgcagtttttaaatacatactgcaactgaggagcgttaacatcagtcacataatcccggacaatagcccaattataatctttataataatcagcctctttctgtgtctgaaaataacggtctatcacttcctgtcccgactttccctgtttgttcaactctttcaataattgaatagttgcttttacatccgatggattctgttcaaaagtctttacaagagtatgtaactcaactgtcgttttttctatagcaacagcaccatatgtgctcattaaaatcaaacttgctgcaaataaaattctacacttcatatcaacctgcttttattagtttcactacatctataaaacacccaaaagggcaaaaagggttatcgaaaaacttaatttaacgtcaatattaacagtatttaggcattaaaccttctatttgcaacaatattctcccaataagtataaatatgcaactgaaaacgattacaaaaactcgaattaaacacagactcgtaaaaatttaataaagatagcacttgtcttttaacttcgctgcataatcaatatcctcctgctacaagcatcacaataaaaattttatctttgcattataaatcatcaaatcaaaagatatgacaacaaaaagacaaaacccattattggaagcatatgatactccttaccatacaccaccattttctcaaatacaactaggagattatgaaccagcctttcaacaagccataaaagaggcccgccaggaaatagatgacatcaccgccaatcaggaagctccttcattttcaaatacaatagaaacattggatgctagcggtgaaaaactcaacagtatttcctctatattcttcaatttgaattcagcttgcaccagcgatgaaatgcaaaccattgcccaacaagtctcgccgcttctgacagaatatagcaacagtatcaccatgaacccgaagctgttccaacgtatcaaaaacgtttatgacaactgcgacagaaagcaactcacccccgaacaaaacactttactagaggatacctaccggacatttgtcaaaggaggagccaaccttcagggagaagcccaacaacgctttcgtgaaatcagcatggaattatctcgtcttagtctgaaatttgaagagaatacattagcagcaaccaatgcttttacccttcatatcaccgacaagaccgaattatccggactaccggaaggtgtaattgaaatggcagctataacagccaaagacaagggacttgaaggctggcagtttactctacacgcccccagctacattccattcatgaaatatgccgacaaacgagagctgcgggaacaaatgtaccgggcctattcttcacgatgcaaccaaggtggagaatcagacaacaatgagattatccgccaaatggtcaatctgcgccttgaaaaagcacaacttttaggatacaatagttacgccgactatgtgctcaccgatcgaatggcagaaaccgtaaccaatgtcaaccagtttttagaacaattactcaatgcatcccatccgcacgctttggcagaaaaacaggaggtagaagaatttgcacatcgcaacggatttacagaaacacttcaacgctgggattgggcctactattccaataaactgaaacaggagaaatatgcgttagacgatgaaatgctgaaaccctatttccagttagaaaaagtccaacagggagtatttgacctagccaaccgtctctatggcctaaccttccaggagcgcacggacatccccaaatatcatgaagatgtccggacatacgaaatatgccgcaacaaccaattcctagcaatcctatacacagacttttttcctcgcgaaagtaaaggagggggagcctggatgaccgattatcgtgggcaacaccatcaaggctctgaagatatccgtccattggtttctattgtaatgaactttaccaaaccaacaacaagcaaaccatccttgctcacctttgacgaagtcactactttcctacatgaattcggtcactccctgcatggcatgttatcccggtgtacctacaattcaacaagcggcacaaatgtctatcgtgattttgtagaactaccttcacaaatcatggaaaattgggctcttgaaaaagagtggcttgatacttgggcagtacattacctcactcatgaacctatgccacaggaatatatcgacaaaatccgccgagcagccaattttcaaggtggataccactgtgaccgacaattgagttttggtatggtagatatggcatggcattccatcacagcaccatttaaaggcaatattctcgattttgaaactcaagccatggcctccacagaatccttcccctctgtcaatggaagttgcttttccaccgcattcggacatattttcggtggaggatacgctgccggctattatagctacaaatgggctgaagtgttggatgccgatgcatttgcagtatttaaagcacatggcatctttgacaaggaaactgccgattcatttcgaaaaaacatcctcgaacgaggaggttctgagcatcccatgattctttacaaacgcttccgcggacaaaccccatcagtagacgctcttttagaacgaagcggtttaatacaaaactaataaacgaatatattgaaactctaaatacatttcactatttttgtagtaaacaacaaatcacacaatcatggacaacgacaataaaaatcaggtaatccgctttgactgggccatgaaacgcctgttacggaataaagcaaatttcagtgtacttgaaggtttactcacaactttattgaacgaaaagattgttatacaaaaactgttggaaagtgaaagtaaccaagaagatgaattcgacaaatacaatcgtgttgacattcttgctgaaaattccaaaaaagaacttattctgattgaagtacaaaataacaatgaatacgcctacttccagagaatgctgtttggaacatcaaagttggttacagaatatatcaatagaggcgaaagctacgataatgtacgcaaagtatatagtgtcaacattgtatactttacattaggacatgggaaagattttgtataccacggaaagaccgagtttagaggaatccatgataatgacatacttgaactctctccattccaaagacaaaaattcaaggtcgatgttgtaagccaattatttcctgaatattatattctgaaagtaaacgactttaatcgagtggcaaaaagtccgctcgaagagtggatttactacctgaacacaggagaaattccatctacagccacagcaccaggactagaagaagcgcgccaaagattaaaattggataacatgacaaaagacgaattatctgcttattacagacacttggacaatatcgtcatcctccgcgacaacatcactaccgagcgggctgaaggaagggctgaaggaagagccgaaggaagagccgaaggagaaaaactaaaagctttaaaagttgcgcaatatttaaaagcatccggcactcctatcgaattaattctgggggcaaccggactatcaaaagaagaaattgaaaagctataaaaacaagtgattaaattaaacctaaagaaagccacttcattttaagagaaattcccataaaatgaagtggcattaaacatcaaacaattaactaatatagcttaaataaataaatcagccacctgtttttccaactcctttcctctcaaaccggatgctataattctaccttctttatccaacaaaaacattgccggcactccacttatactatataactttacaatagggcatttccatcctttcaatgaagaaacatgattccaattcaaatcatacttttcaatggcatcaacccaactatctttattgtcatccaaagaaacacttaatatttcaaatcctttgctatgatatagatcataaatctttttaatgttaggaacttctctcaagcatggtccgcaccaagatgcccagaaatccaacaatacatatttgccgcgaaaatcttttaacgaaacatttttaccatcaggagtctgtaatacgaaatccggagctgtactgccaatatccgttttccgcatatcttcaattgtcgccttcaattttttccctaaatacgcattttggattcgcggagtcaatcctgcatacatcaactccacttcattaacctctctctgttttgctacgaaattattgataattaaagcaactgcataactatctggataattggccaccaaactatctattatatgggcagttttggcctttgttgctatatacatctgagccaaagaatcctgcacctgctgattatttccttcttttcccataaaagaaagacccaacatcaccaacatttcatcacgctgagccatcaatattgtcttgaaaatatcctgttcaacactacctgtaatctccgtcctcacatgctccacctcttttcctttgatgttcttttttattgtttcacatgttacattgataggtactgaatctaaaattatgacattgggagtaccatttacaaataaaatccgctcatcaacatcgcctaatggtttttgcatcttaaattgtccgttacgcactatagcagaatccaacgtctcataattcttgtttcctaaatctttttttaaatatacaaccttaccatctccatccttccattctccctggattgtataacaagtctgttctttaccacaaccggttaaacatattgccataaccagacccgccaacatatttttcatatacatacgactttaaaataataattcaattctaaatttgccaaaaacaatcacacatctttgacttttactttttcaattcatctaattttaattgacaattttttatatctgcttcttctacaccgacaccctcttttccttcctctaaagcataagtcaacacctctacagctaaatcctttctatccaggccaatcaaatgatcagcaacaataacagcagtctttacagaaggactcaatttatgtaaaaacacataccaattggctaccttatctttatatgcatcatttttttcccctgtatagaattcttcatacttctctacattttccaccatacttgtagaggtatagtaatcatcgataccagaaaaagcaaacatcatagcacgcatttgctttacagattcatactctttttgatcacctttttctttagcagccttcaactgctcgtccattgccttacgcatctctattttatcctgatacgttgtctcatatttcttttcaagttccactaaataatcaactaatgtttgattaaatttatcaaccttctttgttgaagcatagtaatccaaacgagataaattggatggtaaataaattgtacccccgcccatcgaagctgatgttgcgctatcctttgctttaattgctacaaacaaacgatcttttaaaactaaaacctcatcaaaagatttttcctggtcggccatcgctgtcgttttcaagcaagcacttaaaaacgaacatatggccttattgatttccttagttgcttttttactttttgtaggattagcagcttctttacaagctgcatctacataacggttggctaatttactgtcaaacaatgtcattttagctatacgagcaatattgacagaatccaacaattcagaatcatccacaaacttataatagtcaagcaacaaatcgctaaaatccaaacctgacttgtccttcaaaacaatatactgatctagaaatttcttgtcacgtactcctttttcatactttctttcacactttttcaattcaggataagcagcataagcctctaatgcttttttaccttcctgtacaaacatatttacatctcttccgcccaaaaaacgatataccaactctccatttccatcaataaaaagaaatgtcggataggcagatacctcaaacattttagccaccattttaccatcttcacttttctctgcatccaatttcaagttcaggaaatggctgttataaaactcccctgccttggcctgtggaaaaatattttttgacatatgtttacaaggaccgcaccaagatgtatatatgtcaataaatactagctttttctgctttttagccatttttagcacttctgcataactctctttatgaaattctataccctggggtaacgctgccaagctaattaaaagagctgacagcaaaaaaattaactttttcattttatcactattttatttgtctatatccaatacgattgtatattttttattcttttcaaaatcacaattatataccagcaaaaaatcctctgcaacaactacattccaagattgtccatctgccaaacgtggattagccacacgccgcgggaaataataagccaagggaatatcattgacatgctcttgctttagtttgcctcctttcaccaaagtactatcaaagtattcatttgtagtaattgtcacaagacactgctttccttttatcttaaaatcaactttataacccaatggctgcggattttttaattttacatcccatgcaggatctccatacatcacaacaacatctctatcatggacaaaccccatttgatcctttgtcggttttttacctattaccgcttcaaattcttcttcaaacacatcccgctctcccaactccatcttagaaaaagggtagttgatagtcagtatttgcggactccattgctcctctatatgcaacatttcttgttggttaagataaacagcctgtgccaaagtcatccttcctgcatttgaagtccaatatttcaaaccaccccaaccattacgaccataccaagtagtaacaacataacccaccatggctgttgcatccattccgcttagccaggcgacggccatactttccggatcattgtttatatttccaatcaagcaattacctgctgcaaaatagacccttggatgttgagtaccttctaaaaattcaggcgaaataaaatcagcatacagccgtccaccctgaggttttaaattacccacagtaaagggcatttccagatttttttctgtagcatgagaagatgtcaccaacaaatccggatcgatttctttatatttctcaacccatttgctcaatatctcccacttattgatttgataactcctagtcacactatctgctaatcctctttctccccaacctccaggctcaccgccatcactcatataggcaaaacgttcaaaatatttcccatcactcaactctcctgttgtattcaatgctgtgcggattacaaaaggttttgcacttttttccaccatacgcatagcatcttcagctgtatatccggtaataatactccatatataatcagcatagatatcattgtctattttgcggctcaatcggtgaccttccattacaaactctcggttcagccgttccggtttatccacaacggccaaatatcgcggagtcaaattacgcaactgctccaaaatatcccctaatccattttcataatacacaactgtcgccttatgtctttttaccagagcattcacaacattcatccaatctgcatctgtacggatttccttagaagctgctaccacatacccattcttctgctgagccatcacctgaaatccattacctgccaataacagacatactaacaatattgtaaaaacaattctattcatcatatatccggaattaattaccttgaaacatattaaacaaatccttataccgcttcatacgttcagcttccatgtctttgcataacttgtcatatttttttgcattttcatggtctccggacaaagcatacaattcagccaacaaaccataataattagttccgtcaccactagctttcccccatgctgtcaactgtaaagcaaatgacaacattttattcacttgcactacctctaatgattcatcagccaacacagacaatacagccaataaataactgcctttcagctccatgagattcatatttacaatcatctccaaactctgtattacttgatcatactgtttaccatgtaaagctttagcaactgctaatttaagacgcatttcatcttgattgaataaatctcctttatttactaaataagataaatgtgccactttaacagaatcaaacggaggcaaaatataatgtccgttttctccacaaggttcgcacaacttatcgacctccttttttaaattacgacttaatacagacaatgcctcataccttttatccacctcctcttcattcccgacaactgaatttgcctttttcaaaagattatttaaccaggcagacctatcttccgaatcggttctatcccatttcatcttcttggcagcatatattccatactcaaagacattggaataaggatcggaaaaaacatatttgctcaacaacaaataagtatctttatcttcaatttgcaatacaggacaacgtgccatatattcacgaatcaccctttcagcttcttgacgcatcttggtatttcccaacgcctccacatattccttcaccgccttgacatcacgcttgtttgcctcgtattgcttttttaacaactccacatcattttgtgcggatgctgctaaacagcaccctacacaaaaagcagttataacagatcttttcaacatatcattaaactagacaaacaatttacattttcagattcttaaagaaatccgcttctactctatcatccggacaattagtgttttgcatttttacaatatcaagtcccagaatatctgtcaaataaggcacaatagctattgtacgttccaatatcttagggaaacgaccaaacacatgattcaattctgttttcgttgtcccggtcaaaaagttgatatagtctgaaacatccaactgtctatctacaactataactgtaggtttacctcgtttatctggtttacttcttatataccctttattacggaaagtatatatatctggactatactcattcttcgggtcgttttcccatggagcaaatattgcagtaacttccttaccggttttaggatctttatatcgcaaattcaaaaaagctgtaggctgttctgtagcacccagatacaaacgagaaatcaacagatttgaaaaagcttctttccaggtggtccaatccttttctgtgtatcctttcatccgatctccgatattgggaataatcaacatatcctcattttccagataagtttccaccaaatcgtcaggagaataatcataattattacaaagcgaatcacatagaaagaccctgacaaaccagttccgacggataaagtctccatccattccagcaaagacttcttgctgaatagtattaaccacatcctttatcatttccttattctcttctttaataggagtataccatttgttaaaatacccgctccaattagacacttgaaaagcaaattggttataatcataaagataatacacaccacaatattcccatgtattatataccagttcctctacagagcctggttccccttttgacaaaccatataaaggtcctcccaattcaggatccgaattaatatcctcagaacaactggcaaacacaaacaatgctgcacatatccatatatttataaaattcttcatacctctcttcttttaattatttattcgctgtaatattctctctcatattatccatacactctgtattatatttcaactcactttcaggtatacgcaatacataatttgcagatgttgcaggtaaagtatatacttcataagtattccaggagttataccatttatgtacgatttgcggtcttccctgacggcgcaaatcccaaaacctcattgcctcctcgaaacagagttctctgcgacgctcatcccaaataaaatgcaataaatcctctccgctattaaaatcagacatttgcaaatccacataattgcttatacgtttactccgcaacttattcaataaatcaatggctttttgagtcacggtattttctttacgggtataagcctctgccacattcaacattacctcaacacttctccaattttcatggtataatttatcattaggtttttctgctgtagagccggaaacacggcggtatttcaccggataataatattgatattctgcaggtttatcatcttcccacaaactttctgccggtttagctggaacatcctgtataaaataagctttctttctcaagtcattctcttcataactttttatcaaagaattttcttcgctacaagaagtccgaaatcccaatccatacatatgtccggaagcattatccgacaaatattcataatacacagattgatttccaaaagtaaatacaatctccggattcaacataccgtccatcatactaaaaccttttgaattggaaacaattcccataatagccgtatcaacaccattcaaatcaaatacattagaattttgtgctaaaaacagctcgctggtacggaccacctcatcccaattttcctgaaaaagagcaatacgggaagcaagcaataaaattgcaggctcagtcaacaagtgtttatttccgggaactacacttttgtttacatactgctctgccaaagaaatatcagaattaatcaatttatacacctcacgtatagaagcccgaggacgcggagtaatttgaatttgaggtgtcgtgcgtatcaccactcccggttgatccaaatttgcctcagcataaggcaaggcataggtattaaccaaacaccaataatgataagcgcgcaatccgtatgcctgtgctgccagataattgtacttgccggaatcctgctccacatactccattgcaggcaaagcatcgataacaagattacaagccagaatattctcataacgctttccccagaaattatctgccaacaactcacccaaattccaacgccaggaatacgcctcctttccctcttttcccgacagagcatcaaatgaatcccaaatcttacgtcctacaacttcaacatcggaagaatctatttccaaacatcccatctcaacatcatccgtcatcaatttaaaccaggccacatcatcattaaaactggaaggatatccctcagcataaagcatgggagaatattcttctattttaccaggaatcaacaaatcacctgaatcctctttcaaataatcattgcatgcagacaacagaccaacaatggcaaggacacatccactatataatatttttttcatctttcaaatcaattttaaaatgacacattaataccaaagctataagaaggtaaaataggaatattggcttccgaggtttccggatccaatccctgccacttcttgtttgcccaaacatgcaggttagatgcttggaatctcaatgccattgacgaaatacccactttatttaataatttttcaggcatcatgtaactcagacctatcaaacgaagacgcagataacttgccttagccacacgcacggaagaattatcatataaataagtacaataggcaaattcctgactttcatccgacatatttctcaatcctttatatccaaactcatctgctatgcggtcgttatacagcactggtatatccgtatatttttcatcacccggcttcctccaacggtcattcagattagtcgatacatttgccactgggtcaaaggccttgttcttattatcatatactgaaggcagacgttttacaccaccgatattataggtaaatccgacagaaagagacaaacgcttcttaaatgtcaaatgggtatcaaatccaccggatacatcaggattgatagaaccgcttttcaccaaacgcatcatggtaacatcaccttcatgatacaattttccatctttaccataaaacaaagggtaaccattctcatgagacagaccgacataatcaaaagaatacattgtgccaactttttccccttccacagccagattaccagccaacattaaatcaacctcttctttattattataaaaatcatcattagccagagtcactttattgatgttgcgtccgaaattcacattaaaattccaatcgaacaacttagttctcaacaagccaatacttaaattaccttccacaccatgattatccatttcaccggcattcataaacaaccgtgctttaccgtttgacaatgctaccgttttatccataatcaaatcctcggtatgttttttatacacatcaacactaccggaaagacgtccttcaaagaaagaaaagtctgcagccacattccaggaagaggtcttttcccaacgcaaatccggattcggcaaacggtagatagttgacttatccaacgaactgaccggattccggtcctgtatttccagaatcagattcggtgttgaatcatcatgaatatttccctgtacaccatagctacctcggatagctataaaatgtcccttatcagcaaaatttgacaaaaaagattcgttagtcaaactccactttccggcaatagaccaagtaggcaaccatctgtatttaggattgctgccaaatttattggctccatccgaacggatattgaaattaaacacataacggttattgtaagtataactggcagtaccgaaaaacgatgcaacgcgggaaatcgaatttgtattactaggtaacaaagctccgttcaaagcatatgtatcattgaattttgttgtataaaccggcataaaacgttccccgaattcaggagtccaaccatatcctgtgacagaagtccctttataactgtttcctctgatttcagcacccaccatcacattgatatcatgcaccccatttaaaatctgcacataattcaaagtgttacgaaccgtataaccgctctttgacgtattttcctgattcagaatacctccataaggcaatgcagacttccaatattcatcagaattttcatcataagctttgtattcataacctctgattttggtcacaaagtttgattcatctgttttccaatctcttgtgttggtagtggaattatgataagagaacacgccctgataagaaatgccccaccctaactttacattcaagtttaacaaagcattaaaatcattcattttcgcctctttaccggtattatccaactccttcaagacattataattataattagatgaattcttatataaatgataatccccgtcatcctcataaggcttcaaagttctggaagttttataggcataactgaaagggtttactacagaataaccgtcattttttgtcgtactaaaatcaatcttcgttgaaaagctgataaatttattcaagtctacatccacttttgccaatgaggtaaaacgctcgctcactgaacccttggcagcaccttgattattattataaccggctgaaaaataataccggatagcttccattccacctgctacactcaatgcatgattatgagtaatcgagtttctgaacaacacatcaaaccaatccgtattccgatgtgccatttcatccgcttttgcagcaaactcctgtcgggtaatccgacgatttaccaactcattcagcaaaccttcatatgaatcttctggattcaatgtaatagtagaaccatacatcaatccatcttcaaaaatatctttagaaagtttcattctctccgccgaattcatcaaatcaaaattccggtaagatggtctttgattcactaccatttctccatggtacgacactcttggttttcccaactttccttttttggtagtcaatacaatcacgccgttagctgctttaacaccgtaaattgcagtagcggatgcatccttcaatactgtgatagactcaatatcctgcggactgataccagaaattgcattacctatcagatattcggcatcctcactgttcaaatccgaagctgaaacaggaacattctgctccagaatcacaccatctaccacccataccggagccttattaccattaatcgttgatgttccgcggatacgaattttaggagttgcactcggttcaccggaagtattcataaccatcaatccgggaatttgtccctgcaacatctggtcgatagaggcagcacctgcaacataaatctcatctgtcttcacaacagaaaccgcactggcagattctcttcggtttacagtctgataacctgttaccaccacctcatccatattcagatttgcttcatgcatcttcacgtcaatacgctcctgcccggtataggttcttgtctcaacatgcattccgacaaaagaatagacgattttaattccatgcttattttcaacaaccaacatatattctccgtttacatctgttgcacatccgcgagaggagccttccatcatcacagtaaccccaggaagcggctcgccgtgaacatctatcactttccctttcagcaccttcaccttttcatctttttgcggcatcggtttaataaccaccatcccttccagacattcaaaagaataaggcaatccctttaaaatctgactcatcgcagattccaaggaagcatcattcacctccatggtcagtctatgatcatcagctatttcctcttcattaaaaacaaaatacactccggtctgttgttttacagctttaaatacttcacgcaaagtagcattttccaattttaaattaactgtctgcgaccaagcgcctgcatacacattcatcgacaagataattgtcaaaatgactgtcaacctcattcccaatgagatctttccttcaaccttcaaccgttgaaaaaattcaaagacacgttcttttgtcataaattattattatttaaattagttgttaataaacagtagatttcactgcaatatcttttccattgatcataaaactgacattggttgttttttctattattttcaacacattgttcaattcatcatacttctttactacgccggtaaagcgtcttgttttaaattccgcagcagagaatataaagtcgacaccataccaacgggacaattgtgttgtaatctcttccaaggtcatattttcatactcaaaaatgccttgtatccaagagatattagtagaagctgaaaccgaatttttagccattttacctgatttcaaatctacagagacttgctcgtcaggcgatagtccaactacttgtccgctcatctctacgtttactcttccctcggctaaagttgtcaccacacgatggctatcctcataggctgccacattgaattttgttcctaccacctctatatctacctcttttgcatgtacaataaacgggtgtgctttatccgatttcacttcaaaataggcctcgcccttcactaccacttcccgggaaccgccaacaaaagataccggaaaggtgatttccgattcagaattcaaccaaacccgcgtcccatcggacaacgtaaaatgatactctcccgaaaccggcacttttactgtatgccataccggctcttccattttttgatgattcaattcatactgcaaaccgactgtcgtgtcgttcttaatcaaggcaccttgctcctgcacctcccttaaatcgtttcttgtcaaatccaattgagtaccattcgccaaaaccagtgttgcttttgttgttccgggcagaatgtgaatattcgaaccaagaggtacagtctcctcacgactttccaaaaatcctaacccaatacctagaaacagcaacacgacagcagcaacagctaccacccgctgtctgatacgacggattttctttgcagccattgttgccgacaatcttttccaagcttctgcatcacgaatttcctctgatcctttcaccatccgatgcattttcaccagacgaagatatttttcaaatgtttcccgattttcaggagctgtgtttatccaactctgcaatgttctgctatctgcttcgcttatatttccgctacagtaatctacgatatgttcaaaaatattttcacccatattgccatctcttttcttctatattccgagaaattgcaatatgggtgaataaaaattcaaaaaaatttatcaagcaaacattaatgccacaatcaacaagtcgcccaaactttcccttaattttttcaaggcatgtgaataatgggttttcaccgtatttagtgatatattataacgctctgccacttgcttgtacgaaagattttccaatgcgatggcattgaatacttcgcgggccttttccggtaattgattcacctcttttatcaaccgttctctcaaagatgcaaactcttcctcatctgttactgccacttcttccaataaagaatttacatgttcttctatatcgtcaaaatatacccgtccctgtttttccaataccttcagtgatgcttttgtaacagctccaaacaaataagcctgcaaagaacctgcaaattcatgtccttttctattctcccaaaaagaaataaacacgttctgaacaacatcctccgcatcttctatcgatgacaaatattttaaagcgtacacacacaatgcatgataataattgtcaaacatcatacgcacacatttctcattcttcaactttaacagttcaactatatcctcctcagtatattgcattgtgattctatctcaaaactattcgcttcttaaacctacagaccgtaccgtcctgcaaaattccttctataataatggtatatggaccctcactgtccgaagtcgtaaaataacagcttccctgtccggcaacatttgtccggacatccggattccaacagactgttttacgcatatcaatggtatcctgcagtgccaaacgcaccgaatccacttcataacgaggcatataaaattcggcttttttctgatagcccaacaacgaaaaagccacaacatccaaacggggagcctctctcaacacaaaattaggattagtggtgatgacgattgctccgttttgtgccgcccctccaaaaaagatctgcgaccgatacgaaggaataaaactgatgctcagcaaatcttccggcaacaaccgcataacgtaatccatcctttcttcaaaatcattgaccagaatgtacaaaggctttccaaagcgtgtcacagaatctccaagcaccgtcacgccgggaatttcctgtaataccattcgtatatcccgccctgccaaagaggccagtttcgccgaatcaagattataatcagccatcccatcataaaatgaatactgcttacgttccatccgtctcttcacaaccgcttcatccaaaacatacaccttcactccattgtcgtaataataatctttggaaaaccgcttgtaaaaatcatcttcaccattataggcttcaatatccacaggccatagacttgtcggttgcagaaacacctctttgtcaatcaccacctccacattgcgccgtccccgtttattccgcccttgtatgacaaattttgtactgtccggaaatgcaattccatctatcagaaaatgaccggcagagtctgcatttacaacgccgaatgtaccattggttcccaacagtatcaacttcgcatcttcagcctcttttccccaaaaattcttcaccctacctgaaattgtctgtccacgttctacataataatccaatttaccatatttttccttcaacacatccgaaatatcaaaacgcgtccaaccctgtgtcaacatcaataaatccaaataacgtctggatattacctggttgttgacaaaataagctgcaggatcctcaacatatcctttcaattcagaggtcagcaacaaataagacaaaatatggtcttgcaaagtatcctgagccacctgtccgtcatcggtaatcgccacagaaaaagaaccggacaaatcagtcagacgttcatccgagacacaaatattcaaacaagcagaatcacggacaagataactatccctacttgtgttcacctttatttcaggacgttgcgcatgcttaataaaacaaagacgccggctgtaaacatcccctgctccattcaccaacaccaaatgcaaaattccttccggcatactattatttgaaattttccctccactgccaatctttacctgttcacaatgcaaaggtacccccctggaatgcaacaccagatagagtggctcatgcagcttcatcccggcagaagcttgtaccacataccccgtatgctgttcggttgtcataactctcagagctatcgcttcccgcttgctttccggcagggcaaaacatttttccttatctccacaacgtacttttgcaaaatattttctcccgggctctgctgtcaattcaaaccctcccatacctttatataaggtctgtatataagtcacctgctcccctctgtcatccaccaccataccagccacattccgcgacaatccgtcttttccgatagccttaaaagccaccaattgtttgcacccttccaataaatcaccaccttccggcataaacgccacatcaaaatccccgcttccatcaggcaatacaaccattcgctcaaacaaaaatgggtcttctccattgaaacagagagacaccttcttgccaaaatcagcagaatccaaccggattctgatatttccctcctcatccgtattgacatatttttccttaccacccaacacatatctcacactcacttttttatacggctcttgcctagagttaaggaaagatattttagcatacatccccttgggggaattttccaattctacagcagtctttaccttcgtatccttaggattcatcacccgaattttctttctaaaaagatactcgtcaccggcattctgcatccaatacgaataagctctcaaaaaataatcaccctgcttcaaatcatcatccaaaggcagataaccggcaaaaacagaatcctgcttcgctattttctgtctgacacaaagactgtcctgcgaatcgcgaagctctacgtatacaaaaccgcttaaatgagaaggtttgttattgacagcattcgtcagataggcacgaaaccatatctgctcccccgcctcataatgatcacgatcagtatgcagatacaccttctcctgaggaagcttctgaacccacgtcaccaactgccgaaaaagtcgctctcgaaaaccatctgcatccggaattgtaaaagcaaatccggccacaagaaaaagcaccaacagccaacgactatgtttcataagtcttttattaaattaactattgcaaaaataatcgttcttatgacatatgcaaaaaaaatcggcacaagtgccgatttttttaattaataacttatcatctactgtgattgaatacccttggtatctgcacctctttacttcgccacttcagtgcactgtttgtgggctccttcagctggttcagttccacaatagcctgtttcatatctctaatcagcaaatccgccaaatccttgccggttccctgccggatgaccaccctcataatcaccacttcctccatgtccttaggcatcgaataagcaggcacctgccagcctctcaaacgcaaacggtcagaaagatcatacaaagtccaattatatctctcttcctctttcaatttccatacaaacaacggattaggcatctcatcactcaaaaattcaaagatacccatctgtttcaattcttctctcaaatagagacagacattgatacagttctgctggattttatgatatccttccattcccaaacgcaagaactggtaatactgtgccaacacctgattaccggggcgtgagaaattgatggaaatactcggaatgctggcacccaaataattcacggcaaaattcatctcttcgggcaaataggttttatccttccagataacccaacccactccgggataaaccaacccatacttatggccggaagcactgattgacaacacccatttcaaacgaaaatcccactccgtcttcggatcaataaaaggatggataaatccgccggttgccgcatccacgtgaatacaaatctcccaccccttctctcggttcagcttatccaacgcatcattgatagcctttacattatcattcagaccggtaattgtcaccccttgaataggcacaacacaaatagtgttctcatcacacatcgccaccacatcatgcggatcgagcgtaatcttgtcagccgtcacaggcaccattctcatctcaacatcccaataaatggcaaatttctcccacaccacctgcatgcaggtagaaataataaaattcggtttatccgtcggcaatccctttgcccgtcttcttttctgccagcgtttcaaggcagacaaagctcccagcatacaggcttcagacgacccgaccgtactggttcccgtgcaatacggatcttccggcgaattccacaatttggcaatcatattcacacaacggcgttcaatttccgccgtctgcggatattcagtcttgtcaatcatattcttgtccatattttccgtcatgacacgacgggcatagtcatccatccaggttgtgacaaacgtagccaaattcaaacgggcattcccgtccatcatcgcttcgtcatgcaccatctggtaggccacttcgccgggcattgaatgtgctggcaactcatacttgggagccacagaagcttcctcctcagtaccgaatatcggagtattcggattttccatctctctcttcataattcaatatagttttaacattgtctcgtttattacggataaaacatccttaagtttcggagaatcacaacatttaactcttaaaaaacattcacaaatcatgccggtttgtgcaaagattccctacagtaatttgttataaccatccaaaaggctatctttgttgtccttaaaatgaggatatcatggaagaatgttttttaaaatacatagaagaaagtattcacaaccattggaacagaccggcactgacagactttcagggagccaccagttcctataaggatgttgctcgcaaaattgaaaaactgcatttattgtttgagcactgcggcattcagaaaggagacaaaatcgccctctgcagccgcaacaccagcacttggggaattgcctttctggccactttaacctatggagccgtcgttgttcccattttaaatgagttcaaaccggacaacatccaccacattgtgaaccattcagaggcacgcctgctttttgtgggagacgtagtttgggacaatttaaatgcagacgagatgcctaacttagacggaatcctgcgcatagaggactactccctccgtttttcacgcaaagaacaactgactgaagcccgggcccgtctgaatgctcttttcggagaaaaattccccgaccgtttccgtccggaagacgtgcattacgaatacgacaatctggacgatctggctatgattaactatacctccggtacaaccagctcctccaaaggagtgatgcttccctaccgcagcctgtgggctaacctgaaattcgccattggcgtattcggagtgacgcccggagaaaagctggtaagcatgttgcccatggctcacatgtacggactcgctttcgaatttatctatgaatttgtcagcggcatgcacgtccatttcctttcccgcatgccgtcacccaaagtgattgcggatgcctttgcagaagtgaagccgaacatcatcatcgccgtaccgctgattattgaaaaaatcatcaaaaagaaagtattcccgacgatagagaagccgcacatgaaactgctgatgaacatcccgtttgtcaacgataaaatccgtgagaccatccgacagaaagtagtggatgccttcggtggcaacttcaaagagctgattatcggaggagcagcattgaatcaggaagtggaacgtttccttcgcaccatccatttcccctacacagtaggctacggaatgaccgaatgcggaccgatccttgcttacgacggctggaagacattcaaacaaggctcctgcggcaaggcagttccccgcatggaactgcgcatcgattctgatgaccagcaacacactgtaggagaaattttagccaaaggcgattgcctcatgatgggctactacaaaaatccggaagccacggcagccgccctcgacaaagacggctggttgcacaccggcgacatgggtgtcatagacgaagatggctatctgtatatacgaggcagatgcaaaaacatgatcctcagcgcaaacggacagaacatctacccggaagagattgaggacaaactgaacaacatgccttttgtcagcgaatcgattgtcgtagacaggagcgaaaaactggtggcattgatttatccggatgccgatcaggtgagtgcagaaaacctttcagaagagcaattaaacgaagccatggccaacaacctgaaagaactgaaccaacagcttcctgcctacagccagcttacttcctatgaattatacaaagaagaatttgaaaaaacacccaagcggagtatcaaacgattcttgtatcaatagatataaagtatattgacttgttgcaaccaacaagtcaatatttttttctatcttcgtaggtcgaaaatcctagacctatgagaaaaaattccaagcgtaagcctacaaatacaacagacagaaaatcaacacagtctgcctttattgaaatgatcaaacagcagcgtatccgcatcatatcgggagttctattagcattgctgtccatctacatattcatatccatggtcggctttttctttgccggaggaatagaccaaagtctggtagatgcacccatgcataaaatcatagccaacccggatatcgtggcagccaacccgaccggaaaactgggagcttggttttcggacctgctcatcaaccgctggttcggactcgcctctttctttttatgctatctgctattgctatgcagcgtacgaatcatcggtgtacgaatccgccatttcaagcgcaggctgtttataggcatgacaatcgttttatggacctccctgctattcggattcatctctgaatctatcagccagctactgaataccggatcaggatacctattccctggaggcggacacggctactttgtcagcatctggctcaattcgctgataggacgcataggtactatattggtactcattttcacagccgtcatcatcctctttttcggatttgaacgcaccttctaccgttgtgtcgactatatcaaagcctacatccgcaaacgcaaggaaagaactcttgcagccctgaaagccaaacgcgcagccgaacaggcacgcatgcaagctgccatagccgcacaagaaaagcaagaggaagaagaggaaatttcagatgctcccattgaacaagaacaggacaaacaggaacaggatgaattaaacgatttgccttgggaaaatgaaaacattccccaggcacaaaccgaatttgaaatcacacctgcaagcaacgaagaggcaccggaagaaaatgaagatgaagaagatctaaatgaagacgaagataccgacgaacagccgatacaagaggatctgaccctggatgtcaatgcagaaactcaagaggaaactgtagagagaaatctgccgttagaggattacgacccaacgctcgacctctcgcactacgaatatccgactctcgacctcttggaagaacactcctcgggcaatccgaaagtgaccaacgaagagctggaagccaacaagaacaaaattgtagagactctgcgtaattataaaatcgagattaccaaaatcaaggcaaccatcggtccgacagtgacactctacgaaatcatacccgccccgggagtcaagatttcgaaaatcaaaaatctggaagacgacattgccctcagccttgccgccctcggcatccgtatcatcgcaccgataccgggcgccgggactatcggtattgaggtgcctaaccgcaatccggaaattgtttccatgcgcggtctgattgcttcgaaaaaattccaggaatccaaatacgccttgccggttgccctgggacgtaccatttccaacgagacctacaccttcgacttgacgaaaatgccacacctgttggtagcgggagccaccggtcaaggaaaatccgtcgggttgaacgctattatcacctcattgctttataagaagcacccatcgcaactgaagtttgtcatggtcgacccgaagaaggtggaattaagcatctactccatcattgaaaaacacttcctggcgaagctgccggacgaagaagaggccatcatcacagacaccaccaaggtagtgaacacgctcaactcgctctgcatcgaaatggacacccgttacgacctgctgaaagatgcacaggtgcgcaacatcaaggaatacaacgagaaattcatcaagcggcagttgaatcccgaaaaaggccaccgctatctgccctacatcgtcgttgtagtcgatgagtttgccgacctgattatgacagccggcaaagaggtagagacgccgatagcccgcatagcccaattggcccgagccgtaggtattcacatgattatagccacacaacgcccctctaccaacgttatcacgggtatcatcaaagcgaatttcccggcgcgcattgcattcaaagtcgcctccatgattgactcgcgcactattctcgactcaccgggagccaaccagctcatcggacgtggagatatgctgatatccgtaaatagcgaaatggtacgtgtacaatgtgcctttgtcgatacaccggaagtggatgccatcacccatttcattgcccgccagcaatcctaccccagtgcttttgcattgcctgagtacatcccggaaagcgaaggtggcggtctgtcggatgttgacctcagccagcgagacccgctatttgatgaagcagcccgtctggtggtaagcagccaacaaggctccacttcctccatccagcgccgtttctccatcggatacaaccgtgccggacgcatcatggaccaattggaagccgccggcattgtcggtccgtttgaaggcagcaaagcccgtcaagtgcttgttcaagatgaagccgctttaaacagaatgctataattataaagcaggcttccatcgttcaacgaatttcactatttacatatcattctttgataatgacatacttctggttttggctattgggtttatcaggaatggtcatttgaagttttgtgccgatatagggagcaatatatttctttcgtacccatcttctatcattcactccaagcattccagctatttcaacaatactctttggtgatttacaaaattcaaaaaccttatcttggggtgtaatgatattcaactgatcacgtattttgttatgacttgaggtgtaatcatcatcacttggggtgcgacttggggtatgcgaatcttccacttggggtgcagaggttttcacacctccagtcagtgagcagttgaaccatatcgtcaggttcacaaatggcggaacaatttttatctccggcgctggaagtttctgctctctacagctttccataataagacctatacctcgtccccaagcctccatcgtgccacgccgatagaatacatttgctatagtagggttggctggtaaagaaccaatatggtcatttacaaagtcctgccatgacataccaagcggaaatgctcccggattctggaatacaatgcggtcgtcataaatagccagacttggagttgtattttcagcattccaagaacgatgacacagcatattgattgtagcctcctttacagcttcataaggcacggtaagcgtatcttgcctgaatttactatccattctgccagataggttcaaatgcttcaaacagaaatccataacagcatcatactgttcaaacaggttcccttcgcaaacagtctgatcacgaaatactcttttatctattccttcaaagcgggccaaacggattttacactgagggtgtaataaggaaggctctttgccgaacaatacatttgccgcattcaatatcataccatcctttcttgcaactccaagtttaagcataatcttcatagggtcttgcagagtcattgccgaagcatgaatacgccttgaccctattccgtcatgcaaagtctgatataacagttctgtgtcaatatcatcaacggctatttcagaattgggcgtattttcccaactaaatctctgtggattactgattttcagacgttcctcgtacatttgtcttggcatcaatgctgtcgtgctttccactttatagaaagctctgccatcaaacgaatatggtccattcttgaaattattggagtcgaaatatatagcaatcacataattatcaggcttgtctggtaattccacatattcaacttcaacatctattgccggttcaatcttacgaatagcatttgccacctcctgtcttgtattatcagtaacgttttgcccaataatcttcaaagacggagcaataccaaacatcagccagccaccatcggaattcagaaacgcacaagccgtctccattcccttatagagctcgcctgttgttttttttagttccaaagttcttgtctcgtccttagctatcagtttctttatatcatcaatcgttgtcatatttttatactattgtgaatatacatctatttttcctctccaaagaataactgatagtagtacatcactcgttctttatcatagccattctcaaaataaactattttatacaaagatagaaaataaaataatgacaagaaatacaaaaaacaaacttcatcaaagtatataaacatggtgctaccaaaaaaaatattttccattgcgcaacatcaagaataattcgctacttttaccgatgattactaacatcatcaacacattgattataaaacaaatataaaatatcatgaccaaaatgaatttcttaaaacaagcttacaccggcaaaaaccaatggtattggtatgtgctgtcattattggtaatctttattgcaacacaaatcggctcactgccactggtgggctacatcttcctgaaagaccctgcagccctgaccaccggcaacatcaacagcgtcacctccaccaatctgggactggcactcatgctcctgagctttgctgtcggattcttcgccatcttcctttgcgtcaaatacattcacgggaaaagagccctggacatcgttacggcacgccccaaaatagactggggccgcttcttcttcggtgccggcatctgggcgatactctccatactaacctttgccctgacattcctgaccggagacaatggcgatatcactttccagtttgaaccgtcgaaatttttcgtcatgctggtaatagccctgctgatgttcccgttccagacctcctttgaagagctggtattccgtggttatctgatgcaatgggcatacatcctgtttaaaaacaaatgggcagccatcatcctgacaggagtcatattcggactcatgcacagcgccaacccggaagtggaggacttcggtatgctgttggcaatgcctcaatatatattgatgggactgcttttaggctacatcgccgtgcaggacaatggtctggaactttcgctgggtatccatgcagccaacaacatcctgtccgccatcaccttcacctccccctcgtccacccttcagacacacgctctgtttgtagacccgaccccctcggcgtcaggctgggacaccttgtttatccttatatcaggacttctctttatctggataaccaaccgcaaataccgcttcgtgcaacggtcacaatttgttaatcttttcttaaaagatagataaaagccacgtagaatacaaaattccaatgacatttatctatctttgaccctgttatgcaatcgttggataattttaaacatcaaataaataagtaaaacatgaacaaattagccaccttaaccgttggagcattcttgactgttgcaacagttgccaatgctcagacaaaggaggaaggttacaaattcacagacatcaaacgccttccgactaccagtgtaaaatcacaagaccgtgcaggaacctgctggtcatggtcaaccatctcattcttggaatctgaaatcatgcgtatgggcaaagattcagtgagcttggcaccattatatgtagtatggaacacctaccaccagaaagctgacaaatacgtacgtatgcaaggcaaaatgaacttcggtcagggaggtgcttctgcagatgttacctgggctatcaaagaacacggtatcgtgcctctggaactgtacaccggattgaactacggagaaaacgtacacgcacacggagagttggatgctgtattgaaaggatatatcgatgctatcgtcagcaatccgaacaaaaaattgagcactgcctggttgagaggatacgatgcagtattgaacgaatacctgggagcaaaacctgaaaaattcacttggaaaggtaaagaatatactccgcagacattcgcaacagaggcttgcggtctgaacatggacgactacatcagcctgacctctttcactcaccatccgttctacacccagtttgccatcgaagtaccagacaactggatcggtgaaatgtcatacaacattccattggacgaactgatggatgtattggacaaagccatcgacaaaggatacaccttctcttggggatctgacgtatctgaaatcggattcacacgcgacggtctggcagttgttccggatgtaaacatcaaagagatgagcgacgctgaaatcgctaaatgggtgaaaatgccgaaagctcagcagactgcagaattgttgaaaaaaccgggcaaagaaaaagaaatcactcaggaactgcgccagattgaattcgacaaccagctgactaccgacgaccacggaatgcacgttgtaggtaaagcagttgaccagattggcaacaaatacttcatcgtgaaaaactcttggggagactacggcaaatacaaaggatacctgtatgcttcatatcctttcgtagcttacaagaccacttctatcatgattcacaaggatgcacttcctaaagatctgaagaaaaaattaggcatcaaataatcagagcctgatataaaaactgaaaatctccaaaagtttttttgaacttttggagatttttcttattattagcccggtaaacattataccaatgccacccattaaaaaaacaaaaacatggaacgtataatacaacttattcttttgcttggtttgctactgaatacgagctgcataaacaaacagagaaaatttcaatctgaagcaactaacgacactaaggttgctataattggctttaatgatagtcttatcgatataacagttaccgataaagacaaactatcagataaagatactgtgatatatgaagtcccaggctattggctatggttcacaaaagaactaccttcaaaatacaaaaaccaagattttctgatgtggacagagtgcaaagtatattgggaaaatgtagccgtcatcaatgtatttgtaaccaatcctacagaaacacctcttgaatacggcagaaaatggacacttaggaaactaaacgaacaaggagaatgggttactccaaaaacaagatactcaccgattatctgggagcaagatttactcattgactccaaagctcctttattatattgcttccgttttcctatcggtgaatattatcacctgccgaaaggaatataccggataggaaaatcattcgctcttcaagggaaaaaagattttgatttgtatgctgaatttgaaataaaataaacagcaagacgacatgcaaacaaaaatgcccggagataatctccggaacattctgctatattttacaaagagaatttagcaccgacaaaataggtacgcggaagtgccggtccgtaaacataggcaccatctttgctcactccatagtcgatatccttctgatagctgtcgaatacattctttacaccaccgttaatttcaagatgcaactgtttggtcagccgtatatcatacgacaaacgtacacccatatcccaaaaatccggagccattttatcacaatcctgctcgattgtgcctgcattatgctgcaccagcatccgaccggtgtagtttccaaacaatgacaacttcaattgtttcaaaaggttgacgttacctgtcaaataaccgtaatgatccggcgaacggaacattctcttttgcggctctacatcatccgaccaacgttccggtttgtcataacggctgcgctgataggtgtagcccaactgcaattcaaaacgtcccgggataccggcttttgactccagaccgataccggcaactttggcacccgaagcattccgacgctctttgataacatatccctctgcatcctctcccaccttttcgagggtgaacacatcgtccaaaatggtatagaaaccttccaacaggatattggtctgcaatttaccgaaactgtgataatagtcgcacgaagcactcacgctatgggaatattccggttttaagccggctgaaagccggataatagccattttattatccaatgcatcgatgtgcaaatcctcgttataagcctgcggggcacggtagccactagagtagctggcacgcaaaccgatattttccacagggctgtagcgtacattcacacgaggcgaaaaaaccaccttatccatcatattgtgcttgtcgagacgggcaccaatcaagatattcaacttatcgctccgccattcgttctggaaaaagaaaccggtgctatgagtggtctgcttgaaatggcggttggcagccaggtatttatcattcaatttattgtaattatattctaaaccgacagtcaattctgaaggcataaaccataaatggtcaaatgaataggtatactgcccaccgccgacaaaggtcttatcagaagtagcaccataggcatccagatttttctctgtaccgaaataactgtcgcggtcaattccctgaccggaaacatatagacctgcacgatgacggctactcgggctgaaatagtcgaatttcaatccaccgccgttgattttgtgatttaactgctctgcaatatctgccatatgaggcggcaactcgaaagcatccccgccccgacggaattcatgcatgtggtggtattcagctgtcaagcgagtataaggggtcatcttgtaataggtacggaatcccactgtttcggaattcaactcaggaatatcggaaaaattatccccattgtggtcgtaatgttcgcgatctttcaccattccaaacagataaagccccatccgatagtcatcactcacgaacgaaccgttcaaagaggtattgaaatctgtctttcccccttcaatgatattggtagtatgtgacaaggctatagaattgcgcaacggctccttggtgatgatattcaccacaccgccaatagcattggcaccaaaaagagcagaaccaccaccgcgaatcacctctacccgttcaatcatcgcaacgggcaactgctccaagccgtacatggctgccaaagagctgaatataggacggctgtctagcaacacctgcgaatactgaccatcaagaccattgatacgcaactgagtggttccgcaattggaacagttgttctccacacgaacacccgactggaaattcatagactccgccagattcgatgaagctgttgcttcaaagatttttggcgacgccaccgacacaatggttgaagcagtcttcttattagtttctgtccggttggctgaaactaccacttcatccagcgacaaggcctcttcctccagttcaaaattaacctccaccgttttgttattgaccaaatcaacagtttgagacgacgatttatagcccacaaacgatgctaccaacgtatgacgtcctttcggcaggtttttcagaaaatagtgtcctgtagcatccgttgccacccccatggttgtaccctttacggcaattgtcacaaaagccagatgctcgcgcgtcttggcatcaattacatgtcctataatattggcatcacttttctttttatcatttacagattcttcctctgccaaacacgcagagaatgtaaggagcatacacaatactcccatgatatattttttcattgaaaattcgttttttattaaatataacaatcatgattggagcagacacacaatctgtccagtaagcaaaagcaaaataaagaaaagtcaatacacaggaggtgcacgcagactgaatatccttacagatctattgcggcgggcagatgttttctgtacccagaaaacaaacggtttaccgaatagtttcagcaagaatgaaaagaaggtcaccgcagttgctacaagcagggacaattgcgctatcaattggaattgttgcgccgtatgctgatgctcggaacccgaagtaccaaaaaagatgtgagaatggactaaaatgcgtccatcaattgtatgggtatgcggaaacagagtcgtattgcaccagaaccccatgaagaggaacaggagcatccagccgcctatatttcgtttctgcattttcatttcattcccttagagtcggcaaagataaaaattttaacgattcaaacaacatacctgatttggaaatatcaagaaaggctacaaaaaaagccggatgaatcatccggcttatgtgagcgaaaaacgggactcgaacccgcgaccccgaccttggcaaggtcgtgctctaccaactgagctattttcgcaagcatttcaaataacgttctctgtttttgacgttgcaaagataaggcaatttggagcatacttccaaataatttgaagaaaaaatgacaaaaaaattacattattttttctcatcactgaaaatcagattaatacaaattcaaaaagaggaactgcccttaacggacaatccctctacactaaaatcaaaccacctactccctcactatcgactctgctcacactcacttaaaacactcatccagcaaagctattcacaaaacaaccatcgtcaactcattcctctatctacatcaaccttcagtggtttgaaatgttgtatgctctttttacgcatccctcggacaaacggtttcaaaagaatccgaaattaatcctaagaggattttcgcagattgtgcatggcggtttgagcaggattttgtaatttcgaagccggaataagaaatttaaatcatggctattgtaaaaaaactaaacggacataccccgaagttcggtaagaactgttttctggctgacaatgcggccattatcggggacgtagaaatgggtgacgactgcagcatctggtttggtgccgtattgcgcggagatgtacacgaaatacgcatcggcaacaaagtgaatattcaggataatgccaccattcatgctacctaccagaaataccctacccacatcggcaataatgtatccattgcccacaatgctgtggtgcatggatgtaccatccacgacaatgtattaatcggcatgggagccgtagtgcttgataatgccgtcatcgaaagcaacaccatcattgctgccggaagcgtcgtgaccaaaggcactgtggttgaatcaggatgggtttatgccggcatccctgcaaaaaaaatcaaacagatgggcgaggatttgttgaaaggcgaagtagaacgcattgtcaactcctataatatgtatgccggctggtataccgatagtgaaaacattgaattataatcattgaaatacataatatgagcgtgatagtttccccatcattattatctgccgattttctgaatctgggcaaagatgttgaaatggtaaaccgcagtgaagcggaatgggtacacctggacatcatggatggtgtttttgtgcccaatatatcttatggtctgccgatagtggcacaaatcaaaaaggcatcccgtaaactgttggatgtacacttgatgattgtgcagcctgaaagatatatcgaagacttccgtaaagccggagcagatattctgaccgtacatatcgaagcatcgacacaccttcatcgcaccctccaacaaatcaaggctgcaggaatgaaagccggagttgccctgaacccgcatacaccggtaaaccaactggaagagattatccgtgacatcgacgttgtgttgctgatgagtgtaaatccgggattcggcggacagtcatttatagaacaggctgtagaaaaaacagccaaactacgcaaactgatcaatgaaacaggcagccaaaccctgatagaaatcgacggaggtgtcaactacgaaacaggacgccgtctagtagaagccggtgctgatgcattggtagccggcagttttgttttcaagtcgcaagacccggaagaaattatccacggactgaaagaattggacgcctaaaccacaacatatggcagaaaccattataaaaatgacggatggtgttatccgccaacaaaaaaacaccatacttaaaaatgtaaacatcgaaattcagcagggcgaatttatctacctcatcggaaaagtgggaagcggtaaaagttcgttcttaaagactttatatgccgaacttcccttggagttcggcacggcagaagtagcaggctttcaactgaaaaaaataaaaaagtcgcaaataccactcctgcgccgtaaatgcggtatcgtctttcaggatttcaagctgttgattgaccgcaatgtgtatgccaatctcgaattcgtgctccgtgcaaccggctggaaaaacaaaaaggccatccacgaacgaatagagacggtattggctaaagtagatatgcaagagaaagccgacaaaatgccacaccaactatccggtggcgaacagcaacgcattgtactggcacgtgccctgctaaatgctccaccactgattttggccgatgagccaacgggaaacatcgatccggaaacctcctacaaattggtagaattgctacgggaaatttgcgataccgggaaaaccatcatcattgccactcaccaatatgacctgattgagaaattccccggcagagtgttctgctgtgaagacggtatgttatatgaaaaaactgcaacaacatcgcccgaacctgcaaaggaaaacgaagcagaacaacgtactctctctttcaggaaaatagaaattccggaaatcgaagttttcgactatgaaatcattgaagagcacaaggaataagtaataaaggcaaccattagaggttgcctttattacttatttcaattttatctctttctcacctatcacaatcagtccctgttttaaaagagtaccgagagcctttttataattcttcttgctgcaaccgaaaagattatatatctcttcaggatcgctcttatccgaaatatccaagacacctccgtaatccttcagtttttcgagcacttcaccggcaagaccttcaatcttggcaaagccggacggctgcagtgaaacatctatcttctcatcatcacgcacccgcttgatataacctttcagccgctgcccgatttttagccgctggaatatctcattatcgtaaatcaatccccaatgggcattgttaacaatcacagcataacccaaatcagtcttacgagccaccaatatatccacctcctgattaggagtataatcaggaaatacctggtcaagatatttgtcaatcttagtggatgcgacaatacgatcggaagccttatcaacataagcatataccaaatatgactttccttcggccatcggatcacgctgctcacggaaaggcaccagcaaatccttacgcaacccccaatccaaaaaagcaccgacagagctggtggctaccactttcataaaagcaaactcacccacctgaacatagggtacttctgtggtagcaatgatacggtcttcagaatcaaaatagacaaaagccttgatttcatcatccggaaaacaattatcggggacatattccttaggcatcagaatctctcctctttctccaccatccaagtatataccgaaatccacaatcttgacaacagtcaatgtattgaatcttcctatttctatcatcctatatttatttgatgtatttattccttacttttctcgtcgttttattcctcaagtttagcttcctgccaatacgactccatctcctctagcgtcatttccttcaactccttgccctgtttcttggcacattgctccacatggttgaagcgacgaataaacttgcggttggtcttctccaatgcattttccggatttatgccataaagacgggcagcattaataatagaaaaaaggaagtctccgaattcctcctccattttctcctggtcggcctgctgcaactccacctgaaactcttgaagctcctcactaaccttatcccacacatcctccttctgcttccagtcaaacccggcacctcgggccttatcctgaatacgataagctttcaccaaagccggaagcgatactggcaccccttcgagcacccgatgcttgcgccctttctccttcaatttcaactgttcccaattctgcaatacctctttttcgtctgccacttgtacattaccgtaaatatgcggatgacggtatttcagtttttcgcaaatctcatccaatacatccgagatatcaaacaactgcttttcttcggcaatctgcgcataaaaaacgatgtgcatcagcaaatcgcccaactcttttttcacttcggccatatcgcaggccagtatagcatcccccaattcgtacacctcctctatagacaaagagcgtaacgaatccattgtctgctttttatcccatggacatcccacacgcaaagtggcgataatttcaagcaaacttgcaaaggcttcttttttcttttccagattttccataattgtctttcaagatattgccgtttttagtaatttggcactgcaaaaataaggttatttatttgaatttcatgattgagaaaagaataagtataggaaacatagatccgattgatttttatggagttaacaattccaaattcaacttactgaaagaatattttcccaaacttaaaatcacagcccggggagatgaactgattattcagggcgaaattggcgacatcgaaatactaaccaataaaataactgccttattggagcactaccaccgctacaatatgctgacagtagctaacttaaagcgaattattctggaagacaatctagtggcagaccccgaggatgccgattctgtcattctatacggcaatgccggcaaggccatccgggcacgtacagtcaaccagcgcaaactggtggaacttgcccgcaccaacgatttgttgtttgcaaccggtcctgccggttcaggaaaaacctatacagccattgcgcttgccgtaagagctttacgcaacagggaagtaaaacgcatcgtcctaagccgccctgccgtagaagcaggagaaagtctcggtttcctacccggagacatgaaagaaaaggtagacccgtatctgcaaccgctttacgatgccctttcggacatgattccccctaaaaaactggaggaatatcttgaaagtgaagtgatacaaatagctccgttagcctatatgcgcggacgcacgctgaatgattcgtttgtcatcctcgatgaggcacaaaatacaacccgcaaccagctgaagatgttcttgacccgcatgggcgtaagtgccaaattcgtcattacaggcgacatgagccaaatagacctgccgcgacgttctgattcaggactggcgcatgcgttcaatatcctaaaagacatcaaaggcatcgcctttgtagaattcagttcggaagacattgtacgccaccggctggtaaaagagattgtcaaagcttataacgaagaaaaagatacaactgattaaaaaagataattatggatgcaattgtaaaaacagatttcaattttccgggacagaaaagtgtctacaaaggaaaagtacgcgatgtatacgatatcaacgatgaataccttgttatggtagtatccgatcgtatttcggcatttgacgttgtactgccggaaggtgtgccttacaaaggacaagtattgaaccaaatcgcttctaaattcctggatgcaacttccgatattgtgcccaattggaaaatagcaacaccggaccctatggtgaccatcggccacaaatgcgaaccgttcaaagttgaaatggttatccgcggctatctgaccggtagctcttggcgtgcttataaaagcggagcccgcacattatgcggtttacccttacccgaaggcatgaaagaaaatcagaaatttgcatcccctctcatcacgccgaccaccaaagctgacgaaggacacgatgaaaacatctccaaagaagaaatcatcgctcagggcttggtaagcaaagaagactacgaactattagaaaaatacacctatgctcttttccagcgtggcactgaaatcgcagcacagaaagggttgattttagtggatacaaaatatgaattcggtaaaaaagacggaaaaatctatctgattgacgaaatccacacccccgactcttcacgctatttctatgcagacggctacgaagaaagatttgccaagggagaaaaacaaaagcaactttccaaagagtttgtacgcgaatggctgatggacaatggtttccaaggattggaaggacaacaagtgcccgagatgacaccggctgttgtaaacagtattacagaccgttatgtagaactttacgaaaatatcactggcgagaaatttgaaaaagccgaatgcgacaatgtacaaaaacgcatcgaagacaatgtcaacgcttgcttgaaaaccttacgctaatattatataaaggagaggcttaccagcctcttctttacttattggttacaaaactagaaaaatcattactcaacaactttttcaactcctcaggcgataccctcactttgtaactaccatccttgaagaaggtgatattgcccgtttcctcactcaccaccacaacataagcatcgctcacagaactgatccccaaagcagctctatgacgcaatcccatactacccggaatgtcacgacggtcagaaaccggaagaatacaacgcgcagccatcaatttattatccttgataatcactgccccgtcatgcaaaggagtatttttccaaaaaatattttccaacaattcactggtaatttttgatttcaacgccactccggtctgtgtataattatacaactcggtattcaattgaaaaacaatcaatgctccggtttttgtagcagaaaaatcaacacaagcctgcacaattgcatccgagacatcatcatcaatcgttggcttcgcaaacattttattaatattaaaaatattctgcaaattataacgactacccaccagcaacagaaaacgacgaacctcctgctggaacacaatcaaaagcgcaattacacccacactgataaactgacctaaaatcgtagatatcaatttcatattgagagcactaagcaccagccacgctaaatagaaagtcagaataccagccaaaatattgatagcagccgttcctttcacaagcctatagacctgaaacaggataaacgccacaatcagaatatccaaaatatcaaaaaaaccgagtgtaataaataacaacatattgacttatttttatgattacaaaactataaaaatttcattatataacgtacaattcttacctttgctccaaactatttattatgcgatatattacaacattactattaatggttgttttcggcacaacaatggcacaaaacgacccgaaagcgaaagaaattcttgacaagatagctgccaaagtaaaggcctatcctgcagtagaagtgatttttaccatgaccatggaaaacaaagcggaagacatccacgagtcgcacaacggccaagcctggatgaaaggcaatatgtacaaagtgaatctgatggagacagaaaactattatgacggcaaagtaatttacaattacatgccggaagttggtgaagtaaatgtcaaaaatcctagcgaagaagaagaaggtttcctgaatccaacaacattgtttgacattcacaaccagaatttcgaccaaaagctggtgagcaacaacaacggaatcgcttacatagagctgtatcccaaagaaaagaaaaacattgaaaagataggcatttgggcaaataccaaggatttatccatccagaaggtgacttcctatgaaaaagaaggtaatgccatcacgatttccattaccagtctgaaatccatgcagccgattccttcggacgcattcttcaaatttgattccagcaaacacccggatgtggaagtaatcgatatgagataaagaaaatggctacttttcagtagccatttttcatttatacattaaaacggaagttcatcatatccccatcctgcaccacataatcttttccctccacggacattttaccggcttccttacatttagcctcagagccataatgaataaaatcttcatatttgattacctctgcacggataaaacctttttcaaagtccgagtgtataataccggcagtttgcggagctttcatgcctttacggaaagtccatgcacgtacctctttcactccggcagtgaaataagtctgcaggttcaacaaatggtaggctgtacgaatcaatttattaacacccgcctccttcaagcctaaatcttcaaggaacatctgtttttcctcataagtttccaactcagcaatatccgcttcgataccggcacctattattaaaacttcagcctgctcatccttgactgcttcacgcacagcatccacatacttattaccattaaccacagaaccttcgtccacattacaaacatacagaatcggcttgctggtaagcaactgcaaatctttggcagcctcttgctgcaaatcatccaacaccactgtacgggcagaaagtcctttcatcaaggcatccctatacaaatgcaacacctccaccagacgttttgcattggcatcgcctccggtcatcgctctcttttcttctttctgcaaacggttttccaccgtttcaagatccttcaactgcaattcggtatcgataatttccttgtcccgcaccggatctacactaccatccacgtgtacgatattatcatcatcgaaacaacgcaacacatggataatcgcatccgtctcgcggatattggaaaggaacttattacccaatccttcacccttgctggcccctttcaccaatccggcaatatccacaatttcaactacggcaggcaccacattctgcggttgtaccaattccaccagtttatttaaccgttcatccggtacagtgataacacccacattcggctcaatcgtacaaaaaggaaaatttgcagactgtgcctttgcattacttaaacaattaaatagtgtagatttcccaacattcggaagacctactatgccacattgtaatcccataagaattaaattatttcactccattaaaaaacaatgtgcaaaagtagtacatttttttcacatcaccgcacagtaacatggaaacatccctgtttatactcataccgcacataacattgctcccttttacgcaaatcctgtaacacttccgccaatacagatttcaatttatccgtttcctctttcttcgcccctttgtaacgagcgtatgcaatatcaaaagtcgttccatagacatgagcagaattggcactggcattaatattactcttacgcaacttcttaactgtggctgcagtccgcaaaacgctggtgacaataatctttcgtgaaggtaaatccttactatccaacgaatcgcggaaattccgtccgatggtttccaataacttttcggctctcggcaccagataaggcaaagaatgtgtcaactcgtccacttcataatatcggcaagattctattttctccatcatccgcaaacggtcctcaaaatcctcctccctcttaataggcgcaatcccccactctttggctgccttaagatgcctggcattcatgtcattaaatgtcctttgaaaatttctaaaataacggaattcaccttttttcttctcactgcatgaacatgctacacacacaagcagcacaaataacaaatacctcactcgattctattttttctgttaaggtagcaaaaatagaatattccaattaaaattactaattttgtcagcgaacaccaaaagtaatataatcaattttaacatgatgaaccataaaaaactacttacggcatttattgccatggcgctcacgtgcaaccatctgtatgcacaagacaacaatgttgatttgaacacacaacgttcagagtcacaagatgtactcaaaattcccggtaaagtgttagatcaccaaggtttgattatcaatccgaccccccattctcttcagaaacaagagggacaaaccttaaacatctccaatggcatcgcactcaaagacaagaaaggcaaattcagcaacgatctttctttcctcgccctgaataaaaaaggtgtaaaaatgagcattgatttcggtgaaaaacttgccgcaaaacaaggtgtgaaaaatatcaccggagcctactcgctaaccattgacgaaaaaggcataaacattatcggatacgatgaaaaaggagcattctatgccatccagactctacgggaaatcatcaaaagtccgatttctgccaacggcaacctcccatgcctcgccatcaacgactatccggaccttccttatagaggtgtagtagagggattctatggcaccccttggtcacaccaagttcgcctttcattgatagacctatacggacaattcaaaatgaactactatctgtacggtcccaaagacgacccctaccacagttgtcccaactggcgtctgccctatccggaaaaagaagcagccaatatcaaagagctggtagaagcctgcaaccgcaaccgagtggacttcgtatgggctatccatccgggaaaagatatcaaatggaatgaagaagactaccaaaacctgatgaacaaattcaaccacatgtacgacttgggcgtacgtgcctttgctatctttttcgatgacatctcaggagaaggaaccaatccttacaaacagaccgaatggctcaaccgcttgaacaaagagctggcagctgccaaaagcgatatttcccctctgattgtctgtccgacagattacaccaaattgtgggcaaaccccacgccgaaaggcagtcttgtaacctatggtaacactctggattcaaccatcaatgtattctggacaggcgactatgtatgcagcgacttgacccgctccactatgaattgggtaaactcccgcatcaaacgtccggcactctattggtggaatttccccgtaacggactatgcccgtcacatcgtgatgcaaggaccgacctacggattagacaataccctcaccagtaaagaggtatgcggactcatcagtaatcccatggaacacggagaagcttccaaactcgccctctacagtgttgcagactacggctggaacatctcagcctacaatccgcttgacagctgggagcgcgggcttgcagaattggctcccgaagcaaaagatgcttacagaacctttgccatccactcttgcgacaccgaaaaaggctaccgccgcatcgaatcgtgggaaaccaaaactttccgtatcaatgattatacccaagccgactatgatgctttattgaatgaattcaagaaaattgaaaaagttcctgccgaaatggaagcaaaatgcaccaacaaagccttattggcagaattgcgtccatggctcgttgaattcggcaaattaggcgtaagaggtcaaaatgccctccaactgattgaaatctccaagaacaacactccggcagagttctggaattcatacctcgacttccaaatgagtccggaagaaattcaggcttacaaagcccacaaatcaggcaccatgaaactacagccgttctatgaaaatacgatgtatgatttactctgcaacttctacaaaggaatgaccggtgtacaaccggacaccagccgcaatgcccgatgcccgcagcatctgaccatcgttgcagcagataccctcaaggcacaggctgcatttgataacaatccgcatacaacattcacaaacggtaatgttttatctttcaccctgcctgcaggcagcactcaatgtctgattatcagcagtccccaaaacacaactgctaccttgaagcaattgtcttccaaagggaaagttcttgccgaagaacctattaacgcatctgtacaaaccatccaaattgtcaaagatgccgcaaaaatagaaatccaaggcaatattacactgcatgaaattgtgcctttacaaacaacaaaataaacagagataacataaaagaataagccccataatcagcagattatggggcttatcttttattcaatattttccttgtctctcataccaatcaacaaaagcctgattcacgagacgatttccaccaggagtcggataatttcccgagaaataccaatctccgccatgattcgggcatgcccggtgcaaattatcaatagactgatataccacctttatctcagatgggcactcctccggagtaatcatctccgctatctttacagaaatttcttcatctgtaaaaggggcatatacctccttcacataattcaccacccgctccttcgaccatccgcattgctccttgctctttatatataccttttccaatctatctgtcatattccgctctttcagcaactccacggctgcattaaaagcaataaactcccccatcttcgacatatcaataccataacaatccggaaacctcacttgaggagaagaagacaccacaacaatccgtttcggccgctgccggcacaaaatcttcacaatactctgcctcaatgtcgtacctctcacaatactgtcatcaatcaccactaccgaatccacgccgggagtcaccgtaccataactcgtatcatacacatgcgcagccaaatcattacggctatttccctctgcaataaaagtacgcaacttgatatccttgatagccaacttctccgttctcactttctgtgccaagattttcttaatctcctcacaactcaattcctccttacggcaacaaatctccttctccttctttcggtcaagccactcttccaatccttgcatcattccataataagccacctccgccgtattcggaatgaacgaaaaaacagcatgttccagatcataatccacacactttaaaatatcctctgtcaacaaacgccccaacattttccgttcatgataaatatccctgtcgctacctctcgaaaaataaattctctcaaacgaacagggagctacattcttagccggatgaatttcactcaacctcattcctccatcacgccgcactacaatactctgtccaggcaacaactcctgcacatcctctacctccagatcaaacacggtctgaatcacggggcgctctgatgccacaaccacgacttcctcatcggcataccaaaaagcaggacgaattccctgcggatcgcggaaagcaaacaaatcaccgcttcccaccaaaccggtaatcacatatccaccatcccaatgtgcagaggcttcccgtaaaattccctcaatatcaatacacctttcaatcgcctcattcatttccagccccttcaatccctcctccttaaacttcttaaatctacgttccacctcctcatccaacagataacctaactgttcaagaattataaatgtatcagcattatgcctgggatgttgtccttgagatacaataaaatccaatatttcatccacatttgtcagattaaaattccctgccagcgaaagattcctacttctccaattattacgtcgtaaaaacggatgcagatacgacactccggaacgtccagtcgtactataccgcaaatgtcccatatacatgttaccggcaaatgggagattctccgtagcagcctccggttccatccttcgaaaatccaccattgccttgttaacggctgcaaaaatctcctgaattgcaccggtaccttctgccctctcccggaaaatatattcttctccaggctttacatccaacttcacagcagcaatcccggcaccttcctgtccacggttatgctgtttttccatcaacagatacaacttattcaatccccacaaggcatccccatacttctccttataaaaggatagcggtttcaacaatctaaccatagctatcccgcactcatgtttaattgcgtcactcataatgtgattgaaagtttagttttctaccgcaaaaatacagaaaataccggagacccgaccatacatcgaatctccggacataataattaaccaaaaaaaacaataagctatcaggaatcttatccctggaacttgcgacttgcacgcaacatatggcgcatgatgctgaccaactcctgggactcctgcaataaattgagatataccaatgaaagctttacgctggattcctcctcctgcaaacgctccatctgcaacttattcagtcccgaaagacggtttttgaaatcctcagcttccaccaacatggcatcagccgcatcataactgcccgaagcaatgatatcgcgggtacgatgtaacaaggcaaccaattcattgcgaataggcaaaaactcttctaccgcctctttcgtcatcggattgaaattattgtcgacatgctccttgcaaggctcacacatacgtttcaagcaatacatcatctgctcactactattgctgcccaagtgaaaccaagtgtttttctcaatggcaacatttctatcaatacgacgcatccccaacatctctttgcggcgcaccttctttaacacatccttctcgtcattggtcatagacacagccttgcgcaaacttctcaaatcttcgcggacaaaaccttcagtcatcttcatataagtattttcagcgaaatccaacacttttaccagattttcctgcacatggcgacgcaacagcaaccacacttctgccttatccttagaggtaatcagacgacggaatacatcatccgccttttcgctctgcatctttttacgataacggatattgcttttcaccaataacagcacggcaacacctatcataaccaacatagcaaccactcctccatagtacatcaccagagtcaccaggaaacagatgataaaagctgcaccggcagtaataaaccatcctccaatcacagacatcacccctgtcactcgaaatacagcgctctctcgtccccaagcacgatcggccaaagaagtacccattgccaccataaaggctacataagtggttgaaagcggcaacttcaaagaagtacccaaagctatcaacaatcctgccagcaccaagttaacagaagctctcaccaagtcgaaagcggcaccgttctctataatcgcctcatccttattaaagcgggaattcaaccaagacttcacactttcgggcatgatgcgggacagggtattgttcatattagtaaagaatcgcaccagactgcgggcaatagccgacgatccgaacatttcatcaccttcatcctgacgggacaaatcaacagaggtcttgattacattgtgcgcttttttcgaagtcatcaatgccaccaccataaccactccggacaacagcaagaaaacaaaaggagtctttgcaggaccgttcaacgaacccatcaggaaaccggtagcatcgtcgttaccgttggccataaaatccgtatagctcgcccagccggcaagaggcactccgacaaagttcaccaggtcgttaccggcaaatgccatagccaaagcaaaggttcccaatagcacaatcactttgaaaacattcaccttcatccaatgcaacacctgcatcaacaccgtaaagaacacaaagcatccaccgacaatcataccggtattgtcatgaacccacattttatattccttggtcataaacgaagcatccttcactcctttaataagcataaaataaatgatagccgttgcagccacaccaccaaacaccccgataatccatttcagtttcgacttatagctaaaggtgaaaatgatacgcgacaaatactgtaccaatgcgccaaacgtaaaggctactgcaacagagagaaatatagccaaaatcacagtcaatgccttctccgtgttcaacaactcggcaaaagtgagcccttccggccccatagcaatctttatcaatgccaacgcaaaagtaccccccaacagctcaaacaccatcgacaccgttgtcgacgtaggcatacccaatgtattaaacacatccagcaggactacatccgtgaccatcaccgccagaaaaatacacatcaactcattaaaataaaaggcttccggccgaaaaataccatgccgcgcaatgtccatcatgccgttactcatcgtagcaccgcaaaaaataccgattgcagcaatgacaataatggtccggaacgaagccgctttagctccaatagctgaattcaaaaaatttacggcatcgttactgacacccacgactaaatcaaaaatcgccaacaaaaagagaaaaatgatgattcccaaataaactgtttccattcttactaatttacttaacgacgcaaaagtaaatcagcaatattacacccatgttacacaattgttacaaaattgttacgtaacaaatatgatatcatctacggcattcccacccttcaacagtccccgtcttggaagaaaaattcaccccgaccttatacaaccggcgggcatcggcttcatacggacgggcataacctttctcttctatctgccgcaatgcatcggctgccgtgccatccaacttgaattcgaagatatacacatattgaggcgtttcaacaatgcagtccacccgaccttcgctctgctccttttccaccaaaaccgtataaacactcatcagacgaagcaacaaataaaacgtatagtggaaataacgctcccgttccggctcgttgtccttgcgccgcatgctatagggaatacctgccaggaaagaggtcagcattttgcgaaattcttccaattgcccccgctttaacgcaaataccgctttcaccatccaagactccaaaggcatacgacattgcagatagttcgtcgccaccattgccagaaaaccgctcttcacctcgttgttaggaaaatcaagcagaaaaaggttcgaatccttgtcgtaatccttaatcgtcagataaccactctgataaatcatcggcaatggatactctacatcagccttgtaattgataaactcgtccggaagataatacttattggtcagttcatcaatcccctcatggaaatgattcatcaaccgaatcaaataagatggcgtaccgctggtgaaccaataatcacgaatatccttgctatcgaaagcattcagcagactgaacggattataaatatctgccatattcttgctaaagtgataaccgtcgtaatgccgcttcaaccgcaggcggatttcctcttcgctacaaccgtccgactctgccatctcacgaataggttctgcaaactgtgtatacaattcctcttccgtaatgccacaaagagcttcatatttatcaaacatactgatatccttgggctggttgaaaccactgaacacactgacctgcgagaatttggtaacacccgtcagaaaaacaaagcgcaaagatgcatcggcttgcttaaacacggaataaaaagccttcaatatatcacgattccgatccaacaattcaggatccctctccaatacatccaacaaaggcttatcatactcatccaccagaaccactgcaccccggcccgtctgctctgccgcagcctgcaagatacggtaaaaacgcaaaccatattcttgggggacatccgttacaattccgtattcccgctcccactcggaaagcatactatccaatacccggtttaaagcaccggattcagtgaaattgattccgttaaaatcaaaatgaaacacccgatgtgcatgccagtcctgctccaacgcatcgattttcaagccggcaaacagttccttcttcccctcaaaataagctcgaagagtagaaagcaacagactctttccgaaacgtcggggacggctcagaaaataaatttgcccttctttgactaatgaataaattaaatcagtcttatccacatagacaaaaccgcctttgactattttctcgaatgtctgtattccaaccggatatttcatagatttcctgcttttgaagttcaaaattgaatttatacaaagttaagcaatttacgagaaaacaagtttgcctcttatcaaaaaaacggataaattttgtatcacttaacaacgcaaaagcaaatcaacaatattatacccatgcaacaaacatatagcacaataaattcaaacaaatcaataaaatatttgtttggaatccttataaataaatattctttcttctgttcctattgtgagatttcttaaccagtaaagagcgtttttaggaacatttgtaaagtctatgtaataatcttctgctgtctttgttcctaaagaaatccattctttgccattatggtactttaattcataacgattgcccggaaaaatagcattagcatcatttcttggcaggtaatatatcttacttatatccacagcttttccgaaatccacaactatttcaccataaattaacccaaaagaaagcggattagaatcgaaaatatcttcatgctttagatattttttataattagataccgtcgacatgttattcattattttatttccattcttatcaaaaaaaaccaactcccctaaatatgagtgtccttgggtagtaagccgccaaaaacgacaactttcagattcagccaatgtaattacattatgatcaatctgaacagaatccatataggcaacaattttactatttttaaaatcaggatcattagacatttccatatatccgccttttaacgtttgagaccatttaatttttcgtgtttcaacaggagtcttacgcgttatacgtattgtttgccgattgtttgtatctgctatcaattcttcaatccttccattttcatgcaatataaaaggattaccggcagtacattgtttatatctatcataataaaccggtaaatagacaataccacgccccatctgtcgaaatacggctttccctttttttatttcagcccagcttacggcactccattcttgttcgttgaatacacacaaataagcataacgtggattagttgtttgagtctttatggactgaacaaccgttgaagtattcgcataatatgaagtgacatctttaataaaaggtgttgctaatgattccggaacacattcatctacagactcctgaggacaaggttgatgagaaaaagtacaacgataaactttagaggggcagtctatgtcaataggcttcattttgttcgggaaaagcggatctatgatagtacaccaataatgccttccatctctacgcccccaaaaaggcacataatccaatgcgacaggcaaaccaaccaatctcaatttgaatatatcataatacgtagcatgcaaacagtcaaaagtatatgacgaatttccgtcacccaatgccaatgtgatatattgaaaaggagatttatcaggatagcactcttttaatagttcatatagattagtaggagtaaattgcataggatatctttgtatctcatttttcaaattttcaaccttacagacaaccgagtcagaaaaattatcaggtctttcattacttatacgataaggaagcagatattcacaaaaatcttgaaaatccaaatttttcaaccaaggagtcgtttgccataatcgaaacatattctctatatgcaatataataaactcaccgtctaaccactccaaatcataagctttatagcaaagcttgccatattctattttttcaggcaccgtttgtacagttttataccatgcataatttttttgaggataaacgtcccgtacacgattattgaaacggtctataaaacctccttccaaggtgtaatgaccaggcatatttcttagaagaaaaagagcagcctttttcttgagactatcgccttcaggactataatatcttaacactctttcccattcacttctattatctccgcttagggataatatattttcaatagacttttcctccgaaaaattgcaagatgcaaaaaaatacaggaaggaaaaaaggtatacaattctgtttattactgtcatactgccatataaatttaatatttatcttggaagtgtccaccaaactctaaattcagtggacctgcctccactagtcataagaaataccctgaaagaatatggcatattcataggtgataccgcccaatacctttaaatatttatcatcccattccaacagtttctccactgccatatattttttaataatctcttctctttttctaagagttctaatatgaatagacagttccactcgtggtgtctcctttctattctttacagcttgctttatcttctccggagtatgacagaaaaagaatatactcataataccggcaataccggattctttcattttaataaaaaccgtctttatcggtaactcctttcgcatagtatccactaaagcctgtatcgtcctattcgtaaaaccgaaacagcctggcacagccccggctgtgaaattagctttcaaaaaagcaacagtatctcctttgaatcttgaccaaggaatacagggataatcttctgtacacctaaacataaaatctacatcagtgtcataaaatagcggtttgttgttgtcggatgtttcctgtcccaatacatacaaagagacaaatacaaatgttaaaataaacaatactgtcttcataatgttattttttaattattaaatacttcccggacatatacttcggcgtacaatcttttttcgttcgactgtgatactcattcctttccttaaatcaaaaaccatttgaccatccaccatccttccttccaatacttccatgccgctccctgtaagatgcaataccgtagatagggcatacaaggaagcctggacactgttatagttttctctatcatacttttttagtgtatttttatattcttctttcatcgttttcatattttcaattccaagggaatcacaatagttctgataaaaaaattctacagctgccggatttacaacatgcagggcaaagattttatcgcttgctgtacagacataaatagttcttaaattaaaaattaatgtctgctttgccaatatctgaacatctgctatggaaggaccattcccactgggatgattatgaatcgttgcaatagtttcagcagatgttcttatagaaacttttgccggagcgttatttgtcataatggtatctaacttaatttttccatctttttcaatataagccgcaccccattccaccttactatttttgtatttgtctataaagtcttcctgaactctgtgttgtaaaagaagattgtacgtattcttgacatcattcaatacctcttggttacaattcgtctcatttcttatacaagtgcaaggtgtattgccacatttgttacaggcaggcggccaatactccactgctgaaccgctaccaccatctccgcctccactaccactaccactaccactacctccaccgatttcatctggtatatatgctacttctgtccaacaatcctgacctatatactctgtggtacaatctccatcgacatagtggttgactacctgaccttcgtattctgtcactactacaaaagtcgtacacgtctcctcatacacgtcaacacatttcgtatatgtacttatacccttcgtctgaatgaaactatctgatctgggcaatattttggtcacagttccgttttcataaacataaccgttagctcgcgtgccgttaagatcatgaaatactatgactccatcaaaaagctcgtctattgtcagataattgtttttataaaacggtttgaaatctacggattcaagatatgaggcagatggcaagatactcataaaaaaagcatctgtttcatgcgtctttttatgtgtcctgacaacaagacgtgttattgtttgacgataacgcttatctttcgacatctcaaacagctctgtattttgtggcaatatgaataaaacggattccaaagtctttaaagttgcttcaactatggtataattgtcgttctcattaacgaaggcctgttcccagttaggctccatctccccaaaaagcggatgacgtccaccgcttttggtactgctttcatacacccgccaactgtttgcccgataccatgccatagcatcccggtaagctttgggcaaaacctgctgatttttgaaataaacctgtggacgaggcaaaaaaaattcttcatgctgacaagacaaaatacagaagaaaagacccaaggcacagataacgattttgaatgtttggtttttcataagctattcagttttggttatttaatgtcgatggaagatgctttttcaattgtctgatgattaatctaacttctggagaatttatttttatgtttttagccaacgttttacgagctatttctgtagcttttgctttatcaccaatgcagccatacatatcagcagccaataatccaggcaaaaaacggttgggaatcatttgaccagctaattcccaacatttagcagcattatcatattgttgcattccgacatagcttttacccatttcaattaaagccatgtatgaagatcttcgcttatatgattcctgtaaaatagacactgcctcttcaaatctatcagaatgattcaataattttccatatgtaaacaaaaacataaaatcatagttgagtttttgatgcatttttgctaatttattaagtgcatccgaagaattataagtataatcacctaaggtaacatgccattttttaaatgcagtttcatgagcttgaaaataagggaataaaaataaacctatacacaagacaatcacaacaagagccacatttcttttcctattcaaatcatatattttcctatcatctttcgaacaagatataatagctgccaataaaaaaactccgtaagcttgaatagtgaagtcagacaatgggtaagagaccatagaaaaaatacacaaacagacaaacattccacgtagaataaatatttcgcgcatatatttttgttgtggtgaacgactcactataaaaccgagcaacccaataacagaaatcacaccaacaagtccacgttccagttgtaatcgtaaaagttcattaaaagcaaactgcgtttcatctgccttcatttttaaactattatccttttgtttattaagaaaacatgcttgtctaatcatgtattctttagagaagccttcaaagccaaaacctagtaaaggcttttcaacaatcattggaattacagatctaaatatcaataaacgaccatcagcagaatcttttttataaaaatatagtccacatgtaaccaatataataataccaatacctaccaatagaaatctgatagtatatttttttttcaagaaaaatattgtaagaatccctgacaaggcacttaaccatgtagctctagaatctgtataaaaaataaaaaagcacaataaaataccgattattatataaaatcctgacataaaaactgtaatccttgacgagaaatatatcatcttaccaaaacaccaaactgcaagcaaggcaagaaataatccccacagtccagtattaataaaacctccacttacctcatataaatatccattgggcgtaaatctcataatatttaaactaaaatacagtcgatatacacttacaactataaatatccaaaatatgttttttatgatttttacaggtaatattcgaacaaaacaataaaaagcggttaaaataatgactgtttttatatacgcaatagaaggacattcatctccgagagcaaaacatatagaataaataacataaaccccaatagcaaaatctgctttttgtaaataaatcttttttgagactatacaataaacacacaatacaaatgaaaatataatcagcaaattagtcaaaaatggctgatatagatgtggcaaggcagacaattcaaagtagtgtggaataaacaaataaaaaataagcataaaacaccctaaagacacccaagccgagcggcaatctaatcttaatatttcattcaaaacattcatataaacaagataatgattgacacaaatatataataaataaataacatgtagttatttatataacaaaaaaataattttttcatcaataagtggtattttatacttcgcctcaagtcataaacaaaactacatcacatctacaattaatctatagtaaatccgagtaaagggttatcaaaagcctattaaaatgttatatgtatgctattattattggattcatatagcattcatataggatttatatagcattcatcatagatttgccatagacatgacttagataggatacggaaaagaataagagaaactttggctaaaatatcagcatcagcaaagtctttatgaaaattttcaaaaaacatatacctctttttaggaaacttgtcgtattagatattgaattcacaaaaatattgtataacaaaatagaaaattaactatgaagcgattcttttttatccacttaataataagctgcctgcctatactcctctatggacaagaacaaatagaatacaatataaacggaatcatcgacaagacattgatgtatgatggaacaaaagtatttttgaaaccaatatggatagattctaccaaaacagaaaatattgacagcactattataaaaaatggaaaattcgaaatgaaaggtttttgtaataaatcgccacatctctatttcattagaataaccaataatacaggcaattttatgacattagaacctggtattattaaggtaaaaatagacagtacaaaaacaataaacatcacaggaacttctataaatgacgatttacataaatatgtaactaaaccttggcaggaagttcaagcacaattaaaaaatgagaatgaaaagtcaaacaaaatcaatacaatcaataaatacaaaacaagcatacttaaatttgtggaaaaatatgctgaatatccgatagtcgaattatttgttgctcaattagatgattatagagtagaattaccttctcaaataataaaacgcttgtctgaagaatccaaagcccgcttggagtggcgaaaaaataaaaagaatgctctaataaatcaatataaaaagcagaaatcgattttgaattagtcgcataaatgtatttatagcttttgaacatgcagattataaaatggatattatagcattaatacttacgcttattttacttgactttggaatatgagcgagttattacgacaaatcatatattcctttcttgtgtggaatatttacaggacgattatctaggagtgtgtttaagcaaaataaaaaattttaattgttagcattcaaaacaaatgtcagtagatataaacaaagaaattcaacgtctgattcatctggatttaaccggagacctgacagcggaagaagcaaaagcgctggaagcatggagcaatgaatcagaacaaaacagacggtttctacacaatatacgtcaggaatggattgcaaatgaagccagacaatttcactccattgacaccattgctgcctgggaaaaaatcagacaacagacttttgcccaaacatctatgcccagaatcagaaagcggggatggcttcggtatgttgccatcatactccccattgccattgcagcctccatactgctattccacggacagacaaaacgttctgaaacggcagcaaccattcagtctcatagtctgaaacatccgacactcacattggcaaacgggaaaaaactgactttaaaccggcagactgaaaatgaaatccatgtccaccaagatatcattgcgcacaacacggaaaaaagcctgatatatgacacaaaacaatctgcccaaacagagcatttcaatacaattacggtcccctgtggaagtgaatttcaagtagttcttgctgacggcaccaaagtatggctgaatgccgatacggaactgaaatatccgattgcatttacgaaaaacgaacggagagtatatctcaaaggagaagcatactttgaagtggtttccaatccccaaaagccatttttcgttgaaacgcaaggagtggctatcaaagtactgggaacaaatttcaacatcaacacccattgtctggaaggaatacagacggtattggttcagggagctgttgctctttgccgggaaggtcgggaggatcttcacatccgtccgggagaattggcaaatttcgaccggatttcttccgatatctccgtgcgccaggtaaagacggatatttacacagcttggaaaggcggatattttgtttttgacacagagactctggaagaaatcatgaatatgctctcgcgctggtatgacaaggaaattctcttcaccgaaccggcacaccgacaactgcatttttcaggacatctaaaacgctatgacaatataaatacgatactttcagccatcacggaagtaactggagtaaaatttaaaaacaaaggacgtactattttggtactttaaacaataacttaattataacagtatgaagaaaagacgattatgtttccggacatcccgaaatcattgggagaaaagctggaaaatgatgaggatgttcgttgtgttcatgtgtgcgatgacactctctgcatccgcttctgtctatgcacagaacgaacgagtgaccttggatttcattaacaccaacatgaaacaagtgctacacgagatacagcgtcagactcatcttagctttattttccagacggaacaaaccgaacaaatcaaaggcatcaatgtcaaagctaaaaacgaaagcgtatcctccctgctggatcgcatattggccaatacaggattgagctggaaaatacagggagacatgattctgattacccaatcgacacctcaacaggttgccgggcagcaatctcaaagccaggagatgctgacatttacaggtaccgtaacagatgaacagaaaaatccgttaccgggcgtaactgtgaaagttcgtggagcaactatcggaacttctactgacgtgaacggaaaattcaaattgacataccccaaaaacaacgacaacattgttttggaattttcatttgtcggtatgcaaacaacttcggttaaatatgccggtcaaaaagaaatcaatgtcatcctatacgaagagaagacagaattggaagaagtggtcgtaaccggttatcaggtattggacaaacgtacacaaacgagtgccatcacttctgtaaaagctgaagacattatgattccgggtgtaaccagtatcgaccagatgctggaaggacgtattccggacatggcattcatgctgaactccggagaagtcggtgctactccccgtctgcgtgtacgcggtacgtcaaccctgcttggcaaccgtgaaccgttatgggtgttggacggtatcgtcatgactgatccggttgacgtagacccggaagaattaaacaacccggattatctgaatattgtcgggaatgccattgccggaatcaaccctcaggacattgagcgtatcgatgtattaaaggacgcatccgccaccgctttatacggaacacgtgccgccaacggtgtgattgtcgtcactaccaaaaaaggacgtatcggcaaaccggtactttcctacagccacacatccaagataaccagacgcccccgctatacagaccgcaacatcaacctgatgaactcacaagagcgcgtggcattcggtaaatctctggcagaccagcactacgtattccctaccaaaatgccgctggtaggatatgaaggagccctttaccgcctgcaaaacggacaaatcggttacgatgaattcctaaatgaagtcacttggtttgaaaaggtaaataccgactggtttgacatcttaacccatgatgcctattcacatggtcacactttaaaagtcagcggaggttcagacatcatccgctattacacttctttgggttatgaccgtgacaacggtgtttcgaatacgacctatacagaacgatacacggtgacagccaagatggatgtaaacatgaccgaaaaattattgttttccatcaaagtcaacggcaatgtacaaaagaaaaaccaccttgccacctctattgatgccatggactatgcctataatacgacacgcgccctaccctgctacaacgaggacggttctttatattattatgaacgctatcgtggaggctatggcggcagaggcaataaatacctgcgctacaacattgtaaacgaaattgaaaacagttccaacggatacaacgggaaaggcattcaagtggatctgaatctaagatacaagattttcgacacttgggaagttaccggagtagcatcctattcggtaagcagcaccatgcaagaaaactggtggggcgagaagagcgcctatattgcctccttgaaaaacggagaatacgaagatgcacccatgccgggagaagacggcaaatgcatccttccctatggaggcattctaaaaacttccggttctgatacggaaaacctgacattacgactgcaatccaactaccgaaaattgtttggagccgacagtcaacacctgattaccgccttgttaggctacgaagtcaatatgcaacgcagcaaaagaacagacaatgaagtacgcggctacctgaaagaacgcggaatgcaattcgtagatatgagttctatggatcttgatgactatccgttatacaaggaatggctgcaacagaaccacacggtactgacccgtggtctgacaaactcattaagtctatatttatcactatcatacggatacaaaaattatttcaccttaaaccttaacggacgtacggacgcttccaacaaattcggcagcaacagcaatgaacgtctgctgcctgtatggtcggcatccggaatgtggaatataagagaaactctttttagtgacaacgaatttatatccgaattacgcctgcgtctctcctatggtatgcaaggaaacatgctggacggacaaacacccaacatgctaatcaaccagctaccgacaaactcctattacaacgaaaatgtatcgaccgtctatcaatttccgaaccccaatctgaaatgggaagagaccaaacagaccaatgtgggtctggaaaccagtttcttcgacggacgattgcaactttcaggagatttctactacaagaaaaccgaaaatgtattctcgtatgtaaatgtcgcccctacaaacggaattacttcctacttaatgaacaacggagatgttgaaaatatcggttactccatttcattatcggctacaccggtcaaaatcaacgattttgcatggcgactttcaaccagttattccgccaataagaacacggtacaaacagatgctgtggaaaactacaccttatccaactatctggatggtacagctattatcagtggcaaacccatcggcactttctattcgtacgaatttttaggtctgaatgcacaaacaggtgtccctgtttttgatgattattcagaccgccgtcaccttctggaagacaaaagtttggaagaagtggtacgccttgtcatgaaaagcagcggaagccgcgaaccgaaattcaacggaaacctctacaacacattcacttggagaggcattacactttcattcaaccttgcatacagcctcggttccaaaatccgtctgttcgcactctattctccgattatcacaggagtcagtgccgaatcaaatgtacgcaaagaatttactaaccgctggcaagtacccggagacgaaagacgtaccaatattcctgctatcatcaaccgttcggatcccatgtttgactactacaaccgtcactggtcgcaggagcagggaaacaagacccagaatttcgccaccaatctgtggagcatgtatgatcattcggacttgcgagttgtcagtggcaactatctgaaaatgcagacactgaccctacgctattctctacagcccaaatttttgaaaaagactcctttttcatcggcatccgtatcgttcagcacacagaatctattcacgatttcggcaaaagccctaaaaggacaagatccttcccaagcaggatttgctaaaccgaacctgtcaatccgcccgacttatacattcggacttaacgttgcattttaaaaaataatatcatgaaaaaaatcatatacggaattatagccttattactatatagcagctgtgacaattttctggaggaatattcccagtcgcagaccgtagcaaagaaagtggcacattttgacgaactgcttctcggagacggctatctaccagctagaaatatcagttacatttccacagaccatgcgggatttctgaatgttatggacgatgacatcaccaccgtacgaggaggaaccgcagcccactattggagtgaagtcatggaaaaaatgttcggttactatgcctggcaattggaagtgggacgcaatccggctggaaacgtgttacgcaatgacaatcagacatggcttgatttctatcgccgcatcaacgtcactaacgtcatactgaaagaaatagacgatttaaaagtcgattcacctgctgaagagaaagatcgtatccgcgtaaaaggtgaatgccacttcatccgtgcttccctttatttcaccttagtcaatctatatggaaaggcatacaacaaaacaacctcatcgacagatttgggcgtaccgctgaagctcaccgaatatatcgaacatgacaaagaacaagagacccaattcagccgaacaccggtagcacaaatttacgagcagattgtaaaagatttaaaaacatctatcgactatctgacacaaagcccgcagaaacggccgttgcaccgggcttccaaggaagcggctcaactgcttttaagccgagtatatctatatatgcaggattgggaaaatgctgcttcggtggcgacagaccttctgaaagacgacacacggctttaccagatgacggaaggagactcagccaaggtattcctgaacgcagacaacagcgaagtactcttctcgcaaggttccatgaatttctacaactcactgaccgctgccagcggtgactttgccgtatcggacagcctgtacaatttatatgaccccaagaacgatttcagacgctatttcttcggcatcaattcaaacacctttgccagaagtctgcaatggaaatatgacacgattcccgtaccgcatgtatccgatatttacactctgcgcattgcagagggttatctgaacctggcagaagcatacgccatgctggacaatacagacgaagccaaccgatatctgcgtaccctacgtgaaaaacgaatcaaaggatatacccataccaactatacaggagaagagcttatcaacgagatccgtctggaacgccgcaaagaattgtgctttgaaggacaccgctggtttgatctcagacgttatgccgtatgtgaaaaatatccgcattctcaaaaaatcgtacatgaattcaatgtgtatgacggaaatatgaactattgggatcgcatcgatatatatgttctgaatgcggatgaccctgcatacgtcatgcaaataccgaaagccgtactggaatacgacaagacacccatgccggagaatccaagaaacaaacgcaatccggaaggagacgatgaataaccattttacaagcaacaagatatgaaacattatacattatatttattactcgctcttctgattaccgcctgtcagaaagaggacggaatcacacccaatatcggattcgagaatctgtatgtcatacaagatgatccgaccgattccatccaacacaagcgttatgaaatctaccagacttatggtgtacccatatatttcaatgacaccatcggtaaagtttttatcaaaaccgatatcaacggagattcagtattccattatgaaatgctggatttgaactggatattcgacggaacgaacagcggctcggtcacttacaaagtaaacagactttatgaaccggcattacagatgaaagctttgcattttgccgaaatatacttgcaaaacagccaagctgcactgcacccttatgccatgtggctcacaaaagaatgctaccaactttcgtcttccggagtggaaaaaaaagaaatgatcagccgttatcggaatctgatggtttcatggattgaacagatgaaagaaaaagatatgttggcaaaagcgacaacctatcggaatgaggtggtaaaattaaaggtacaaaattatgaagaccggttaacggcattcaataatgcgaccgataaaaaatattacgaacaaagctggcaatccttgtatccgaatgaaatattaccggacttccatcaggaaatcaaatggtatcccgtaatcttagaagaagactggggaaaaggttcgaaacaagacagtacgtttcgtaaagacatgaaagaatacggaaacaatgtaaacaagaatctcaagataggcaaatggactgacgaagacgtggatgaatacaaggactattgcagaaaactggtaggagcttacggcttcgtcacctacgaagccaaagcccgtggagcacatagcggttcgagatggactccggaaaatacagaaagtgaccttaacctctatctggaagagatgatgaaatatccgcgcaaagagtttttggcaagatggaccggctcaccgctggtattgaagaaatatgaaattctgtatgccatcatacgggacgaattaggtgttgaattataaaaagaacagatacatgaacaagataaaatatttttgctgcctgattggcctgattgcctgtcacatcgcctgcgatgatgacgaaacgaatatagcccccaaaccggcagacatcagctatggtacgatagaagacaaggcagggaatacttacaagacactcacaatcggcaaacagacatggctggcagagaatttccgctacaggctgaaagagagcaactccactaatcaggtaacattcggggaaatctacggtctcaacgacctcgccattttaaatggtgacgacatgaaaaaataccagtcatttgtcagaaactactccggtcagaaattcctgctatacctgcgcgaacaactttttgccgcagacgatgcaggaagattaaacaccagcagcccttacaagacagtctggattgccgaacaagtttcatcttatagtatccccaatatactaaattacggttttcacaatgacatcaaagacgaactgctggcaatttgggacgatgccatcaaccaccatttgaaaagggatgatgaatatttggaaaaatacggctatctatattcatacgaaggagctttgcaggctgtcaaggaaggtgctccggaaggattccacctgccgacagacgcagaatggatgatgcttgaaagagcattaggcatgaattcaaatgaactggaaggtttagaagaatggcgaagcaatgtaggggaattgctaaaagaaggcgaacaaggtatcggtttcaatgccttgtatggcggagctgcagtatatgcgctgtctacagcatacaatacacgctacatccataaaggagaagaagcctatttttggagcagcgaccaggttttcgtttccgacagtctttccaacggtatcgtccgcaaaatatccatctaccagccgggcatctacagaatgaccagcagactggttgcatcgccgacgaatatacgtccgtcctatagtatcagattagtaaaaacagaaaaataaaaaacgatgaaaaacatattaacgatactcctttgcctgattgccatactcggctgggcaaaagaagataaaaacaaacggataaactattgcaccactttagaagaagccatgcaattgtccgcacaaaaacacaagcccatcttcttcaattgctatgcaggctggtccggaggttccatcatgatggattctatcgtattaagagaacctaaactggtaaaattcatcgagaaaaattttatcagtctgcgtatggacatggtaaagactcaaaaaggacgagcaatcgcaaagaaatacaacgtacgtttctatgctcatttcctgatattggatgaaaaaggacaaatcctgcaccgaattgtaggaggaagcaaagcgcaggaattccaaaaacgtctggaagaggggctgaatcccaaaacttcgctggcaggacttggagaacgctatgaaaaaggagaacgcactccggcatttctggaaaaatatgccaatgctttggatattgccaatgaaaaagcaaaatacacagaagttaccgacaactatctccaacaaacagacacctgccaattattgaaaccgtcaagttggaaaatcctcagtaaaagaggatgggaatacaacagcaaatggtttcatttcatttacaaccaccgcaacgaactgattcagtccaacggagaggcggtcttggaattcattgtcgggagtgcttttcaaaaagtatatccgtgcatgattatgcaggtaccatacaacaaatcacaaatgaaagacattgaaggaaaaatcagtgcacttcctgcatcatacactcctggcaaacaattgcttgcaatatgcgatgtacttcgtctcagacaagaaaaaaattattcggaaatgttgacggcttgggaaaaagcaatgacaaactttccgcaggaacaagttgtctggaaatttgacatttcattagccaaccttcaagatatgaacgaacaagaaaagaaaaatgccgccgaatatctgaaaagtaaaataaaagacttgcaaggctcccgtttagaacaataccaacatgcaatcgaatgtctgaacaaatatcagggaataatttttgagaccggttctttacaagatgctttggacaaggcacgcaaagaaaacaagccggtttttgtagactgctttaccagttggtgcggtccttgtcacatgatgagcacccaagtattccccagtaaagaagccggtgatttctttaattcacgttttgtaaacattaaaatagatatggaaaaaggagaaggcaaagagctgctcaaacgttggaaaatagcagcattcccgacatatcttatactcaataacgatggagaaccggtctatacctcacagggatacattccagcttccgaactgataaagcgcatgcaagaaggactggactcattaaaaaaataaagtaaccgttttcaatttacaaatcagatgataaaacaaataacacaacagatagcaaaggcaacaacgttaggatttttaacgatggcagccctattcaccggctgtgacgatgattcagtaaacggcagtctgcaattttcaacagacaacatactactgaatgcagccggagacaccattacaatcgatgtaaccgccggctctgattggcaagcagaaagcatggcagaatggtgtcacgtagcaaatgccactggcaaaagcaacgacaaactgactatatatgtagatccttccgatgatatttatgaacgaggaacagccgtaaaagtaagttgcgggaacaatgccgttcgtctgtccatccgtcaggaacccatggtatttgaaatcaatgattcaaaaaaagcattgaatttcaccaagggaattgcccacgacaccctatatatcaacaccaatatgaactggaaagtggaaatcaccgatacaacggggtggttgacagttcccgacaccatcggttatggaacaacggcgttggttttcacgacatcagataacagtcaggacaaagaacgttctactaccgtccgattacgatatggtgtacgctcaatgaaattaacagccacccaaaaaggcggtatccgtgctgacggacatattcaaaaacacttcggagacagggaggtagacaaaggattcaacatcatattcttaggagaaggattcattgacaaagatttgattgccgaaaccggtgcttttgacaaagccgtacaggaagcctatgaagccctattcaatgttgaaccatacaaaacctataaagattacttcaatgtctattccatagcatgcgaatcaaaagaacgaggaatcgggacagccggtggaagcaacgaggaaatcatcaaaaaaacagtgttcacttcattcttgtataaggatgccagtatccgaggcaacgatgctcttgcatttttttatgccaataaaatattaggcatgaccgaagaaatcatgaatactcactcagttgtcgtcatactggtaaatgacgaacgttatggcggcagcacttattggtatacatcaggtaaagccatcagctatgtaccgttaaaccgcgatacgcagctgccgggaggctttaccaacatcttcctgcacgaagtaggcggacatgctatcggcaaattggcagacgaatggagtactcccgacaattacctgacaacggaaatcaaaacagaaatccaaaaaacattgtacagcaagctctattactacaatttagccttccctccggcactaagcaaaaacatggcatggatgatgtttgtttcccaaccggcatacaaagatttgctaggagcatttgatggtggcgcaagttatctaagccgtaaagaaaagcccaaagcattcgtatgtcatagtgaagaaaaaagctgtatgattaatcacatgccctatttcagcgtagcctgccgttacggtattgtccaatggcttctgttcaaactgaatgtatacccctatgatagagatggactacagaaagtaatgacccacttttttgaacatgacacctttacagttccagaagaacagccaatatcggacaaaccgcatcttccaatgccggcatttatagatgaataatgaacctattcatccaatatcctgccttttatataaggcaggatatttttcaggcaaaattttacaaccatattgaaaaatacatatatttgcccccattgtcagatatattatacttgacattagaaaaaaacataatcttaagtttcacctaaataaatatcaaaaattcatgaaaaagtacattgcagaaatggtgggaacaatggttctcgttcttatgggctgcgggacagcggtaagtttaacatgtacatccgcagatcccaatctagcctctacagtaatcggcacagcccttgcgttcggactggctgtagtagctatggcttacaccgttggcggaatttccggttgtcacatcaacccggcaatcacactcggctgcctactgacaggaagaatcagtaaaaaagatgctattatgtatatgctctttcaagtaatcggagcctttatcggttctagcattctttttatgttaacatctaattccagtttagtaggtaccggagccaatgcttgtcaggagggtgtatccgttatgggaggattcttggcagaaattttctttacatttgtgttcgtgttggttgttctaggaactaccgatgcaaaaaaaggagctgggaattttgcaggtcttgcaataggtcttgcattagttttagtacatttagcctgcatacgctatacaggaacttctgtcaatcctgcccgcagtatagctcctgctattttccagggaggaattgccttaaaccaactttggatttttatcgtaggaccatttatcggtgcaatattgagtgccatcgtatggaaattacttgcagataacgaacctcacacaaaacaataacttttttcaatataaacactcacattaaaaatcaaaaaaccatgaaactaagaatgtatttaacaatgctggcggtaagcttattaagctataccatgcaaagttgcgatgacgatgatgatgattctaaaaatgtttcggaacaactggaaaatgctttcactaaaacatttggaaatgttgaacacaaatggtctgtccgtggcaccaatcatgtcgctgaattcaaacaaaacaatcaagagaaagaggcctggtatgatgtaaatggtgtatggttgatgacagaaaccgacattacctataacgcccttcctgctgaggttaaaacagcatttgaagctatcaaaaaatatgaaggatgtgaacgtgacgacattgatatgctggaacgcaaaggcatggaaaccgtatatgtaatagaagtggaaaaaggcaacgaagaatatgacctttatttcgatgccaaaggaaatttgttaaaggaagttgccgacaaagatgatgattcagtagattatctgccaacgaccctgcctgatgctatcacaaaaattctgaacgaaaaatatacaggatacaaactgcttgaagcagaacttgacaagacaacaaatattctggaagtcgatattatgttacaaacaacaaagttggaagtttgctttagcaacaatacatggattttaacgactaaagaagtcctgttcaacaccttgccagagagagtaaaagaagctgcaaatacagcttcacagaagcatccgggagcagaattagatgacgaagctgatgaagtagatactcctcaaggaaaatattatacagttgaaatagaaatagaaggcaaaccaagtatagaaataaaaataaatgaagatggtacactcaaacaataatcttcagactgactaaaactaaataatagattctatccgggacaaaatattttattccggatagaatatcacaagtataattatcaacagatgtgcaatcagataaaagaagctaattgtttgcgcaaatgagtataagcattcttcttatgggtttttatagtcaatattgacaaattaagatattctgcaatttcctgattagattttccgtcaagagttaaaagcaatacttcgcgttcacgctcagaaagtctattaatagcaatatacaattctcgatatatctcctcgtgctgtacagaatcatcccctaatttttgttcataagtcagatattcaacatacttatcttccactaactgatgtttttgaaagtcagcacagcgatgtaaaacagcttcatacaaataagctcttaatcctacaaaagaattatatgtcttagaaccttcccatacagctataaacaactcctgcacaatatcttctgctattttacgatcttttacatgacgcttagcaaaaagcacgaggtaactataaaattgctgaaaaagctgatagtatgccttctccttcttgtgattaaaagcttctaaaaattcatcttgattacacatcgcatatttccatttgagcaaacaaaggaaacaaataaaatgtaaaggataatacataaaacaaatattaacatttaatcgatcaggctttttcatgtttttatatagaaaattcaaaagcggtttctatctttgctagaaacaaaatcaatatcagtatgaaacaactattactatttctactattacttcccggactactgcatgcacaagtagcccccaaatacatggaaggagctgtaccccttgaaaatgggaaggtagtattcagcaaatcatttaaagcagccggtatgacacaggatgccatattcagcaaattaatttattgggcaggaaatcgctttgtgcccgtagagaaagatgctatgcaaagtcgtgtactatactctgatccaaactcaggacaaatcgcatgcctcggacaagaatatttagtattcacggataaagccctggctcttgatcgtgcaaccatcaactaccagctggccattgaatgtcaagccggctcgtatcaaatgaaaatttctgcaatacgctatctatacagcaatggtgataaaaaagaaatcattcctgcagaagaacagattaccgatgaatatacattcaccaagaaaaaagacaaactcatcaaagcaacaggaaaattccgtatacacacaatagacctggtaaaccaattgtatgccgatgcagaaaaagctgtaggtgcatctcaaacaacgacacagactgtcgcacaaaacaatgaaagacaaaatgtaccacagacagctaccccacaaacagctaccatagcaacagctatcaatacagaatccgacaactcctctttaaacggatacagacaaattgctccagacaaaattccgggtaatatctataaaatgctttctgagaactggatgttaatcacagcaggaaatgatgccggatttaacatgatgacagccagttggggtggtttaggacatttatacaacaaaccggtagccttttgctttatcaatcccactcgccatactatcaaatatatggaaaacagtgatacctatacattgagtttctatacagaaacttatcgtgatgttttaaattactgcggtagccatagtggtaaggatactgataaagtggctggttcaggcctgacacctctaacaactccaacaggaagcaaggcattttcagaagcatggatgattattgaatgtagaaaaatggtagcacaaccattcaatccggaggcaatcttcaatccggaagcaaaggataaatggggaaaaacccctcataaaatgtttatcggcgaaataataaatgtttgggtgaaataatgaataagaaaggttggcttaaagaaaaaagccaacctttcttattcattccttatagcactaagtgtatcacctttttggtttcaaaaaattcctcatgaaagaaatccggaatattataaaccgttgtacgtccggcaaaaggttttaattcctcctcaaaatcacctccttttaaataaagcactccattcgacaaaatattacgagattctttagacgtcttgtcttttacccaactgacaaatgcagggaaagccgtcacagcacgacttacaataaaatcctgcttttctttgacagtttcaactcgagtctgccgcgccataacattctgtaagcccagggaatcacgaacaccttcaacaacttttattttcttgccaatcgaatctaccaaaaggaaattacaatccggaaacataatcgccaatggaattccgggaaaacctccgcctgttcccacatccataatacaggtgcccggcacaaactgaatcactttagctattgccaaagagtgtagcacatgatgtacccagaatgcatccatatcttttctggatatcacattaattttttcgttccattcgcgatacaaaccttccaatcgagcaaatctttccaattgctcaggggtcaaatcagggaaataagattgtataagttgcacagaatccatcattgctatcatttatggttcgtaaaatctctattatataatggtaaaacaatcacacaaataacaccgacaataatataaagaagggtcatagaactatgtgtaagcaatgcaaaaatctttgccatttcctgcatttcaggagtatgaggcagataaatcaacaaagatgctatcaccataaaatgccaggcacccaccccaccctgtaccggagcgaccataccataacttcccagtacaaaacaagtaagtgctaccaacattcccaaatgagaagaaaattcaaaacagaaaaagcaaacataaaacattaaaaaatacattagccaaatgaagagcgaatgaaaaataaaaagtcctttattgggaacatcttttactgcaagcaatccatcctttaaaccggatagaaaaatgcgaatacgtccttgtatgcgttttttcaagaaaaatttccaaagcagcaatagcattacccccaatagacaaacaaccagcaccatccacgaagaatggaataaatgcgccacattagctttaatttctggattattattcaagaaaatgccaacttgcttaaattgagtaacgacaactactaatgtcaatgcaagcaatatcaacatatctatcacacgttctgtcactaccgtgcccaacaaattggagaaaggcaccttttcatatttgttgacaaccccacaacgagtaaattcgcccatacggggaattgcaagatttgcgaaataaccaatcatgactcccataaaactattccaaaaacgaattttatagcccatagaagcagtcaataactgccaacgcaaagcacgacttatatggcttgctatccccataatacaagcaactcctacccaggtatagttaacatcttctttcagcacagtcatcaattcactccaatcctgatcacgataaaccaaccagaaaagaaatacagaaacagccaaaaacaagcaaaacttaattacatttttcaaaaaaggactcataaacaatatgatgaaaataaatgcccaatagtaaattgtgcgtgcaaatgtacaaaataatgcttatctgcacgctgttttcagcgattttgtgtacttttgcaacatgagtattgttagagctaaaaaaagtttaggtcagcattttctgcgcgaccagaatattgcacgtaaaatcacagaaagcctgttaccaatgacacatgaggtattggaaataggaccgggtatgggtgtattgacacgccatttattgacgaatccggatttttctgtgcatgctatagatatagacagagaatccattgagtatttacattccgaactgccggaacatcgggaacgtattctctatggcgattttctaaaaatggacattacagaactttataaagaaccgttctccgttatcggaaacctgccatataatatatcttcacaaattttttttagaatcatagaaaatcgacaattggtaaaacaagttgtttgtatgattcaaaaagaggttgcagaacgaatagctgctccacatggcaacaaaagctatggtatactcagcgtgtttttacaaacattctacgacattgaatatctgtttactgttggagaaaaagtattcgaccctcctcctaaagtaaaatctgcagtcatccgcctgaccaggaacggacgccaggaattgggatgtgatgagaaactgtttttcaatatagtcaagacaggattcaaccaacgccgtaaaactttacgtaattctatccgtggactcattcctccaggatacgaatcaaattatcttaatatgcgtccggaacaattagatattgatacattcttacatttctgcacagaattgcaagaagcccgtgaaatattaaaagaataacaaaactttaaaatataaaagtatgcaacaatttgaattaactcatgaatttctaaaccaactagaagagttgatagatgccggtaataaatccgaagtatcccaattagttgcagaccttcaccctgccgatattgccgaaatattagaagaactcaataacgaacgtgctcaatttgtattcctcctgctagacaacgaaaaagccagtgacgtattagcggaaatcgatgaagaagagcgggttcactttattgaatcttttccggcagaaactattgcacgccgattcatagacaacatggactcggacgatgcagccgacttggtatccagcatgcccaacgaacaacagcatgaagtgctgtcgcacatggaagacttggaacaagccggagacatcgtagatcttttgcattatgatgatgacacagctggaggtttaatggccaaagagctggtgatggtaaatgaaaactggacagtactcacctgccttcgggaagtgagccgccaggcagaaaatcttgatgaaatctataacatatatgttgtagatgacgataacaaactaaaagggcgtctttcattgaaaaagataatcacagcaccgacatctgccaaaatcatcaatctatattaccctgacattatatttgtcaagactgatgaaccggcagaatctgttgctttgatgatgcagaaatacgacttagtggccatcccagtaacagaccaagtggggcgtcttgtaggtcgaatcacgattgacgacgttgtcgatttcatcaaagacgaggcagacaaagactaccaaatgatgtcgggtatctcgcaagatgttgaatcatcagacagcatatgggaccaaaccaaagcacgccttccctggttggtcatagctctctttggaggtatggtttcagcttggatgatttcattatatgaagcagaaattgccctttttcctgtaacagccatgttcataccggttatcactgctatgggaggaaatgtaggaatccaatcatcggcaattgtcgtaaaaggattagcttccaattcactgagtctcaaaagcggtttcggcaacctattgaaagatttgggaggagcattaattaatgccactatttgctcatcgatcattttcttgctgacgctatcatttggcatgccaaatcttgcaatgcccatcaccgtaaccattgcattatttgttgtcataatcttcgcctcaatctttggtacggcattccccctactgttaaaccgcatgaaaatagacccggcattagccacaggaccttttatcacgctaaccaacgatattataggattaaacatatatctcgtcaccggacgtctgattttgaccaacttagcctaatgcataattatttttggtttttgcataattatagcgcgtaaacataaggttattaactatttaagtagtaattttgtaacaaatcaattgtataaccacagtaatatatatatgaatccaatagtagaagtcaacgtccaatcggaaattggaaaacttaatggtgttattcttcacactccgggtgaagaagttgaaaacatgacacctgaaaatgctgagcgagcattatacagtgatattatcaacttgtctattgcacgtgaagagtataaacaaatttcaggcgtattatccaaaatcaccaatacgtatcaagtaaaagaacttttatgcaacatcctgaaaaatgataaagtaaaagcagaagtcattaatcgtgtagaacgtatagaaccgttcatcagcgaagtatcacctaccggtagtctaaaagataaattattgtcaagcagtgccgaagatttgtcacgtcttttgattgaaggggttgaaatgacaaaagacaatctgaccaaatttttaagcaaagattggtatgctctgcgtcctatgcacaatttcttctttacccgtgatgcatccatgagtgtatataacgaagtgttaattggtcgtatggcaaattctatcagagacagagaatccatcatcatgcagtcaatttttgattttacaccagaattcaaaacaaagacaatcacgatcccgactacagatgaagcaagccctcgtttacgtcatatcgaaggcggagatgttctgattgcacgtgacgatattcttttaattggtaatggtgcccgtacaagtacccaggctattgacatgctaatatatgaattcatgaaccgtaagagtgaaaaagcacagcatatcatagtacaggaacttccgcattctccggaatcatttattcacctagatatggtatttactctacttgaccgagataaatgcatggtgtttgctcctctcattttaaatccaggcagctaccagacagtccacattaccatacagaatggaaaattgcaaagcatccaatcagaaaccaatctgctatgtgcattgaaaaaactcggcatggacttagaacctgtatattgtggtggaacagacgactggaatcaggaacgcgaacaatggcatagtggagccaatttctttgcagtaggtcccggtcaggtacttggctatgcccgcaacaaccacactatggaatctatgaacaaagctggatttgacattatcaaagccaatgatgttctagccaataaagtggatttagcacaacatagcaagtatgttatcacaattgaaggttcagaacttccacgtggcggtggcggtgctcgttgtatgacaatgccgataaaccgcaccaatctgtaatctttgtttataccagatattaaagcgtggtttttaccacgcttttttattttcataatattcacaaaattaatttgtatttttgttctcagaatcacatgataataaagccctaaatttttcattatgagcaaagcaaaatattacatatcaagttttcgattacgcacacttccgctttccttatcaggaatttttttaggtactttattagctaaagctgacggttatttccagtggctaccattctcattggcaatagccaccactctttgcttacagatattatcaaatctagcaaatgaactgggagatttacaaaaagggacagacaatagtgagcgtttaggaccgatacgaagcatacaatcaggagctctcactcttcctgaattcaaacgtacaattataatctttatttgtctatctatctgcttcggctcaagccttgtatattcagcctttgattccattttcagcagcgacggcattattatgattgctttaggagctgcagcaatcatagcagcaatcaaatatacagtcgggaaaaatgcatatggataccatggattaggagatgtatttgtttttcttttttttggacttctgagtacaatgggctcctactttctcatgacccacaaaattaatgtttcggtattattaccggcaagtgctatcggatttctttctagcggagttttaaacctcaacaatatgcgagatatcgaaaatgacaaaaactgtgggaaaaacaccctcccggtaaagctaggtatagcacgtgctaaaatatatcattttctacttattataggtgcatttatatgcatgggcatatatacatcacatcatgatggaagtcattttttctatcttattaccctgccgttttttaccatacacctaataaaagttaccaaaggaattggccgagcactagatcctcaactaaaaattctttctctttcgaccctactatttgctctattagggggactataaaattattttaaaccgatatataaactagcaataccaaatgtcaatttgcgctgttgaacttgcgtaaaaccacattcagccataatcttcaagaaggcattgccttgcgggaatttcattacagattccggtaaataaacatatgcatccttatttcctgaaatccacccacctactgtaggcaatatatggcgaaaataaaatttatacagttgtttcatggggaaacgctcaggcatagaaaattccaatataataacttttcccccagaacgtaatacacgacacatctccttcaatcctaattctaaatgctcgaaattacggactccaaaagcgactgttacagtatcaaacgtactatcaggaaaatcaatatgttcactatctccactctgtaactctatccgagtttccaatcctaattcacgcactttcttacaacctatttccaccatgttagcggatatatcgatcccgataacttttttaaccccagcacgtgaagctgcaattgcaaaatctcctgttccacaagcaacatctaatagtttacccttcccattttctccaatttcacgcattgctttacgacgccaacctttatcgatattcatcgataataaatgattcaatagatcatatttgggagcaatgtcgttaaaaatacctttaacaacctctttcttcgccacaactatatattttaaagaaaataatttatacggataaaacaaaagataaaaagcaacaagcctatcctgtcgctttttaccttttattttggcttttcacttctttaatagttctcaggaaatttaccttccagagcattttttaccacagctacaacttcatccaaaccttctgcaaacttttcgaagtcttctttatacaagaagattttatgtttctcgaagctagcactgccgtctttatcgaattttttcttactttcggtaatcgtcagataataatcgttattgcgtgtagctttaacatcaaagaaataggttcttttaccagccttcactgcctttgaatagatttcctcgcggtcatcattcatgtcaaatccctcattgttttcgtaatctaccatcatcatgcaaattaaataatctatactttacatttttcacgcgtcaaatgtagaaaaaacataagaaagaaacttgctttttaagtatttttttatcgaaatacttaatcttctttgtttttatcccctatttttgcaataaatataatatcaatacgcataaaaaaaatgattttgaaagtatttatcatcgttgctatccttatcggtatcgcttttataggtttagccattacgattttaatcaagaaaaatggtaaatttccagaaatccacataggtagaaataaagccatgaaagaaagaggcattcattgcgctaatacgactgattatttagaccgcaaaaattatcgtccaatatcaacaaaataaaatacgaatctttaacaacactcacgatgaatacaaaagctgttattttactattaggcttgtgcctaaccatgtttttttgcatgtaatgattctaatgaaaatgtcaacgttagtttttatctaacagatgccccgacagaagaaaactaccaagctgtacacattgacataagaggagtcggttactctttaggaaatgaaaaatgggaaactcttccgattcaaccctgtatcatcgatttacttcaatacagagatggtagagacacattactctctctcgtcaacctccatgcaggtagcaaaatacatcaagtacgcctcattttaggaaataaaaataccctaacacaacaagacggaacaattgtacctctcaaggtgcctagtggaaaaacatcaggtctaaaaatcaatgtacaatcaaccattcccaccattaatgactattacgtaattattgatttcgatgcagaaaaatcaattatcaacaaagggaactgtgagtattctctaaagtcggtcataacggcctacttaaaagcaacaacttccaacaaacagtaggaagtgtcaaataaaaatagctgccatgaatatgacattgtctgttcatggcagctattttttatatttaattgcctgcactattgcggatataccatatttttctcttcaataatatccaatacctctcgtaaatatttatctgcctcatatttagccatcggcaaattatgtaacagataattcccacaatccttaggtgctacacccggaacatctccttcaaaatcacgaataaaacggaatgtttcacgcattaattcaacgatatcctgtgcagctaaatctcccttcattaaaaaataatttcctgtacaacaccccatcggtccccaaaatactattttatcaccccaaaccggatgattacgtaagaaagttgcagccaaatgctctattgtatgcaactctccatatcccaaagctggttctcgattcggctctttcatacgaatatcaaaagtagtaacaacttggtcgcccatataatcttttcgagacacatagattcccctcaataaatgaaggtggtcaatcgtaaaacttggtatctttttcatattctttctattatttgttgcaacacttctacagatttttcaggagccaaagtccaaaaattcttatattgtgcagtatgatcttccacaaatccaggagtatcgctgataattcgacaattcaaaaaaggtattccgaacatacaacacacttgtgctatagctccactctccatatcaacagctagtccatccggaaaattatttttgattacgtgtaattcatcacaactagtaatgaatttgtctccactgcaaatcaatcccccttgcaataatacttcgctttttacagccatagcaacaccatacagatattcatcactcacaaaacgagcaggcaaaccttgcacttggccatattcattccctttaccacaccacacatcatggtaaaccacctctttaccaacaacaatatccatcacccgaagtttagaatcaattcctcctgcaacacctgtattcaaaatataatctggagcataatgttcaatcatctctacggtaccagctgcagcacagactttacctattcccgactgcatcaatacaacactcttatcctgcactttcccacataaaaaatgaaagccccgataaacttcctcctttttatccacaagcaaagcttcaaataattgaaactccactttcattgcaacaataattcctatcatgaatcacctattataaaaacggattatatttcttttcctcaccaatagtcgtcattggaccatgtccagtaattacctgaacatcttccggcaataccattaatttttcacgaataccagaaatcaatgcattcccattacctccaggcaaatcagaacgtcccacacttcctgcgaataaaacatctccggcaatcaacaacttatcagcctcactataataacaaagtccaccaggcgaatgaccggccactgcaataacctttaattccgaatgatcaaaacagagcaagtctccatccttaatatagccacccaaagctggtggaggtgttgttcctctcaaccccaacatagcagcatactccacagcttgctccaacaaaaattcatcatcctgagaagctttagcctccaaaccatagcaatctttcataaaattattgccgaaaacatgatccggatgcaaatgggtatttaacaacaacactggagtaagtttctctttcaaaaagaaatctttcaagcgctgttcttcttctccactaaaacatccacaatcaactacaacagcctctccggcttcgtcatacagaaccactgtattctcctgccatggattatttacaaaaatcttatatttcattaatacattattttacagctgtttcaatgctaattttatcaattgctctacggtcgttataccacctcctgcaataatcttgtccaatacttttactgcctgagtttttacaaatcccaacataactaatgctgccaatgcctcctccttaatggttgcagcattatttccaggcatagtaccaaccacttcaactccaccaactttatctttcaattcaataatcactcgctgcgcagtcttcaatcctataccctttacacttttaatggcatttacattttctgtcatgatagcaccgacaatttcattcactgtcatagaacttaacataacacctgctgtattagccccgatacctgaaacagctatcaattgcctgaacatctttctttcttccttcgttgcaaagccatacagcaaatgagcatcctcccgcactatcaaatgtaaaaaaagtaaaacttcctttgcctgagaaatttgagaataagtgtttactgatatattgatataataacctattccccctgattccactacagcatatgttggtgctgcttcaatcaaggctccttttatatattcgtacatgagattagaatcctataattttccgaacctctcgaagcgttttatctgcactttcacgcgccttttctgcaccttcacgagccactttgtccatatactcggtattcgctgaaaaatctaatattcgttcacgaataggcgatgtaaaattaataatatcttctgccagctgtttcttcaaatcgccataacgcacctgacaagtattatatttttcattaaaataatcatacgtatcagccgaagaaactattttcagcatagtaaacaaatttgcaatcgcttcaggtttctcactattcggttctgttggaccgctatccgtaactgctttcatcacttttttacgaatagttgccgcatcatccaccaaataaatagcattaccctctgacttacccatcttaccagagccatccaaccccggcaccttaattgcatccccaccaaatgaataagactgtggttccgggaaaaaatccacatcatatatcatattaaaacgacgagcaaatttacgcgccatttccatattctgttcctggtcctttcctacgggtactttatctgctctatgaatcaaaatatccgcagccatcaatgtcgggtaagtcaacaaacccgcattcacattttccggttgcttgcgagctttttccttgaatgaagttactctctgcaattcacccagataagcattcatattcagatacaaatacaattccaaagtttctttaatatcgctctgcatataaatggcagattttgaaggatcaataccacaagcaagatattcagaaagaatcttccgcacattcgccttcacatcccctggatgcgggtgagtcgtcaaagaatgccagtcagcaatgaagaaaaaacaattatactcatcctgtaatcgcagaaaatttttcactgcgccaaaataattacctaaatgtaaatttcccgtcggtctaataccgctaactacaatctccatttcaataaaattattaataaatattagtttaaactgcaaatatactcatttattccatactcaatctttctcttcaaataaataaatcaatcaacagactgattttttctcaaaaaatgttatacagcttgacttttttttatacatttgacgcaagatatatgaaaatataccaactaaattaaactaactaattttaatcaagctgacatggaaggatacgaaaaaaatgatggcatggagaataatcgcgaagaaatctacaccaaagcggtgagagcagggaaaaggacctattttttcgatgtgaaggcaacccgaaacaatgactactacctaacaattacagaaagtaaaaaaacatttgataatgaaggttctcaaaattttgaaaagcataaaatcttcttgtacaaagaagacttcgagaaatttgcagaaggcctagaggaagttgtcgcctacatcaaaaaagcattcaaagacagcggacgtgaatacactgaaatgcgtccaaaagaacgtgatacaaatttttaaaatctaataaagggactttaaaagtcccttttatttttcaccaataatatcccgaatcacaacagaagcaacaaaacaaccaaatatcggcggcatataagaaatagtcccaacattagattttttattttgactctcagacaacacgatcgcatcaggatcagtaaattctgaagaaaatacaaccttcactcctttatatacccctaatttatgcaatcgctttctcaacatgcgagccaaattacaattataacttttggagatatcagcaacctcaattttagacgggtccaatttacccccggaacccatagagctaactattggtatccccaattgcaaactatgataaatcaaaaaaatcttaggagctagagtgtcaattgcatcaacaatataatcataccttgccattttaagtacctcaatcattccctcgtcacggataaactcgttgatcacgtgcaatttaatatccggatttatattaagaaacctctctttcatcacttctgccttaggacgtcctaaattacaatccaaagccgacaattgtcggtttttattagtcaattccacaatatctccatcaatgattgtcatttcaccaactccagctcgacacaactgctccgcagcatatgcccctacaccacctaatccagccaccaatacatgcgcattttttaatttctccaaacgctcacaccccaataacaactctgttctgctcaaccattccatcataatatatatttctgaaaattaaatctgtatacaaatcatctttgaaataaacgcctataattcacctgaatcaaatcctgcaactcttcctcgcgcatttccaatcgctgcgcaaccttgttataaatttcatcaataccccactccgaattatctgtttccaaaaacagtcggtctcgaggaatctccggcaacaattgccatgcatgggatgcttcattcatcacctggcgtccgactgacagacacattccgtgacgcaacaattcagacataacttcacgccgattattaaagccgtgtagaatccacttatgcgaattccctattcgcttagcttctcctacaatctcagaaacagcccttactccatgaataatcaaaggcaaatcgtactctgcagccaaaagcacctgacgcttaaacacatccatttgtctctccattggcacatacacatttctatccaagccagcttcgccaatagcaacaatctccccatcactcgcaaatttacgaatttcctccaaacgcatttcaacttccttatcaataaacatcgggtgaacaccaacagaatacaacactatttcgccctgctgaacatccaaatttcccaaacagggatcaacaatattcagccctttgccaggtctatgcgtatgtatattaatccactttcccattttacaaaaatagtaaaaggtgataaaaagagaatgggactaccttataaaagataatcccattttcaaattctattatctaaaaccttacgctttgtggcacattatatccaaaattgttttatcagtctgctccatgcctactgatccaataatacccacattacggatagtcttttcaatatcttcttctacaactccatcattacgagtcttgattcctttcatagacaataatgcagcctgtacagctgcagatgttccggaatatactttcaaagcacaaccttgtttagctccatcacacatcattcctgtcaaattagaacacatcgtcttaatcgtattcaccatctgcgcatatgttccacccatcaaataggtaatagcagaagcagaaccagttgctgcaatcgtaattccacacaaagcagacaaatgtcccatataatagtgaatatgtgctgcaaccaaattactcaatgccaaagcccttatcaattgttcacgagaacagtcaaaacgttctgcagcgacaaccacaggtaaatatactgtaataccttgattaccgctaccagaattggtcataaccggtttttcacatccatccatacgagcatccgaagctgccgtagcacgaataagcacattatttaagaagtcgttatccaacactcctttatcgatgttttcttttaatgtacgaccaatctgcaaaccatactcaccattcaacccctcattggaaatagctttattcatttcagcaccttccaacaaaaagtcgattttttcaacttcgatattatgtacaaaatcccaaatacgagcaagactcaactctgcacgctcattggcttctgccgcaaccggagtatcatttttactataaactgtattaccattcttttctaccaaaacgatattggtgtgtccatggacgataacagtctttactgaatcggctcctttatggcatattgcctctgcatataatttatcaggagcattttcttttaatgaaatcttaacagcatcatgatcaagcattgatttagcgacctgaagattatcgccaacagacacctctttcaacacttccaacccatattcggtttttccacacacagcacctaatgcagctgcaatcggcaatcccaccattccagttccggggattcccacacccattccatttttgtaaatattaccacttacatatacctcgattttttcgggaacaccacctaattcttccttacaacgagcacacgccaatgcacatgcaaccggctctgtacaacccaaggcaggaattgcttccatcttcagtatctcaataatttgttgatctgttgcctgacacataatgattttaatttttttgattgatgaagcaaatttatagctttttgttataccatcctgccagacttacaggattaacgcttttttaacttgacatattttactaataattacagagcaagcttttaaaccatacattttgcctttcataatttattctatatcttcgcacaaatttattacatatgtatagactagcactactattgttatttttattgccattgagagttttttcacaaacacacaactcctcaagtataaatacattagccatagatacgttaactatggatagtgtcattattattccggaatatgatttactggaagaactcagtgagccattagaaaatggtggtgcagtggaattacatacaacaggaaaaatacaagacatcttaaaatggcatatccgacaaaacaaacagacacgttcatttacgggctaccgtatacaactctattctgtcaattcatatggatgcgatataaacaaacttaaagaatttcgtgataaatttgaacaggactttttagatatcccggcttatttaaaatattttgatccggattttaaaatccgtgcgggtaattaccattcacgtctggaaagtattcccgccctccaccgcattcgaaaactgcatccttccagttatccggtaaagacagaaatcacactggaagatttaaaacgtatccccatgcaggatattcccaaagaagaaaatcaggtgacagaataacactattttcgaactttttccaataaggcatccaaatcttgctgtgcttgagcatgcaatctcagcgcctcttcactattgggattcaaaggacgatgggcaagcattttattcaatttatccaccttacgcatcaacaaaatcgcttctggctcaaaatataagtcacgaaacttttcccaaatataagacacaccttgaggcgaaatatgcaacatatcttctgcataaaaacggtaatcacgcaattcatccatcacaatctcatacgatgggaaatatgatacaaaatcaaaacgctgcaccaattcatcaattgcaagatgtagcacagacttgcttaactgattaccatgcgctccatccttccaatgccggataggacttacagtaaacaaaaccttcattcggggatttaagcaatgcaaatgctccaagagcccaacatacctttccacaattgcatctaccttcaaacgaaaacgccgaaaagccgcagcaggaaatttatgacaattagacacgataatccctgttttcaaatactcatatacccaagctgtcccccaggttatcaccagcaggtctgaactctgtaaacgttcggctgaagcaataatacgtgagtttatgcctgccaaacattcacccgcatcgcaagcggaaaaatgaccatgatgactaaaactaccccataatccattatgataccacaaatcatcctttttaaaaatctttcgattaagcaaaatatccaaagtactcgccaccgactccggattataaacaattccgcaaggattaatatctacatcaaaatgaaaatattccaatttagcccctatattttcaacaaaacaagagcctaacatcatgatatgcgaccgataactcaaaagagattcgggtgggtctatatgaacaatcgtctgtaattccatgtgacaaatatacatttaaattacatttattgtatctctcaatcgaccactctacaaaacaacaaatttcaaatctcatatttttattatatttttgcactttcaatcatgcattatgagttttattaccacactccttatagccattggattatccatggacagcttagccgttagcatcagcggtggaatgtgcctacactccttttgctggcgcaaatctttgaaaatggctgttatcatgggagcatttcaaggcggaatgacttggctaggctggttgcttggaagtcgtttcagcacatacatcaccagtttcgaccactggattgcctttgtacttctcggatatttgggaggcaaaatgatatatgaatcttttcaaaaagaagaaacttctgtaatctccttctcattcaaaatgctactgactctaggagtagctaccagtatagatgccttggctgtcggcataagtatggcatttctacaaacagacatctggtatcccgctggaatcattgccctgaccacattcctactgtcattttgcggggtcatatgcggattccgatttggacaaatcaaaggactgaaagtggaacttttaggaggtatcatattagtggctatcggcattaaaatattaatagaacacaccttattgagttaaattcaattatgactatttagccttatttaagtgacaaccaataccattcttacgtacatttacctaaataaactaatatgtaatagatatggcttatattgattactatggagtattgggagtcaataaaacagcgactcaagatgaaattaaaaaggcgtttaaaaaattagcccgcaaatatcatccggacctgaatcccaacgatccaaccgcaaagcagaaattccaagaaataaacgaggcaaatgaagtgcttggagatcccgaaaaacgtaaaaaatatgacgcttacggagagaattggaagcatgctgatgaatttgaagcacaacaacgacaatatcaacaacaaagcagtcatttcagcagtagctttactggagaccatggtgatttttctgacttcttcgaagaattattcggtaaaagcaacaagtattctcgttcaaacagcggaggctttaaaggtcaagacttcaatgcagaactgcacctcagtctacgtgatgcagctgaaacacataaacaaattttagacgtcaacggtaaaaaaatcagaatcaccgtacctgccggtatagcagatggtcaaactatcaaattgagcggtcagggaggtccaggtttaaatggaggtccatcaggagatctgtatatcacatttgtcatcgcagaagattctgtatataaaagacatggagacaatctgtacatgaacgtttccatagacttatacacagccatcttgggcggagaaatcatcatagacactctcaatggaaaagtcaagctgaaaataaagccggaaacacaaaacggaaccaaagctcgtctgaaaggaaagggctttccagtctataaagaagagggaaaattcggggatttactgataacatttaatataacacttcctacaaacttgactgacaaacaaaaagaattgttcaaagaattacaaaactcttaataccgatagccatggaaagcgaattaattatcatacgtgaatattgtgaaaaaagccacatagaaccggatttcctgctttcattggaagaaggaggcttgattgacatacaaagaatagatggagaacaatatttattagcaacccaattaagcgaattggaaaaatactgccacttttactatgatctctctattaatattgaaggcattgatgtcattcataatctgttggaaagaattgaagcattacaaaaagaagtaacccaattgcacaaacacctgcatagcttccgcaattatgaaaaaatgtttcctcttgaagacatagaatccaagacgatataaaataagactatcattcatttattgcctctttgaatacacaatgccattcaaagaggcaaaattttttatacaacacactgtttcttaagaaatttttttacttttgcagaatgagataaataattaaaaccataaaacaatataatcgtggagttaaaagaaatagcatcacattttgcactggaaaatgaaatcagtgaaattgaacctctaggaacgggattgattaatgacacctatcgaatcaaaaccatcgctcaagaggctccggattacgttttacaacgtatcaaccacaatgtattcaaagatgttgcacttatgcaaaacaacattctgcgaatcacagaacatatccgccataagctgcaggaaagaagcgaaaacgatttagatcgcaaaacgcttaccatcattccggcaaaagacgggaaactatattatttcgacggagagaactattggcgtgtcaccatcttcattaaagactcaaagacatacgaacaagtgactcccgaatttgcacgtttaaccggtatcgcttttggtgaattccaatactttctaagcgacctgcccggcgagccattgggagcaacaataccagacttccacaacatgtctttcagaatccaacaattgaaagaagctatccaaacgaacgctgcaaacagattagacaaagtccaggcgattgtcgatgaattgctggctcgtgaagaagaaatgtgtctggctgaaaaactttacaaagaaggcaaacttcccaagcgtactgcccactgcgacaccaaagtcaataatatgttgtttgataaggacgatcacttcctgtgcgtcattgacctagacaccactatgccaggattcgttctgtccgattttggcgacttcatccgcacagcaggaaataccggagcggaagatgatgaagacctaagccgtgttagtgtcaatatggatatatttaaagaatttgcctgcggctatatccaatctgcaaaagcattcctgacaccattagaaatcagcttacttccgttcagcggacaaatgatgacatatatgcaaaccgttcgcttccttacagattacatcaatggagatacatattataaaatcaaaaatccagagcacaattatcaacgcacattagctcaattgactctattgcatagcattgatgcacatttacaggaaatgaatcaatggattgaatcactaacaaaataaatactttaattaataacacatgaaaaaaatcatcaacttactagtattctccttggtaattgctctttttagctgtactagccaaggaaaagaaaaagcaaaagaaagcaagacgacagatggcatcatccgtcttgaaatgcctgctcgcccggcaggtcaagaagatgttgtaggattacgttgcgaacccttaaaaaccgtacgtgtcggatttatcggacttggaatgcgaggccccggtgccgttgagcgtttcacttatattccgggagttgaaatcaaagcactttgcgacctttatccagaaagagttgcaaagacacaggaaattctgaaaaaaagaaacttcccggaagctgctgcttatagcggagaagaaggttggaaagaattgtgtaaccgcgatgatattgatctgatatacattgtaactccttggttgctccacactccaattgctgtttacgctatggaacaaggtaaacacgttgctattgaagtaccggcagccatgaatctggatgaatgctggcaattggttaatacagcagaaaaaactcgccgccattgcatgatgttggaaaattgtgtttacgacttctttgagttaacaaccttaaacatggctcaacaaggattgtttggtgaaatccttcatgtagaaggagcttacatccacaacctggaagaattctggaaagcataccaaggcaactggcgtttggacttcaatgaaaaacacggaggcgatgtttacgctactcacggcctcggaccggcttgccaattattagatatccacagaggcaatcgcatgacacaccttgtagcaatggcaacaaaagcagttacaggtccggctttagtaaaagaagcgacaggacgtgacggcaaagatttcaaaaatgccgatcacaccatgactatgattcaaacagctaacggacagacaatacatctgcaacacgatgttatgaaccctcgtccatacagccgtatgtatcagctgaccggaacagaaggttttgcaaacaaatatccgattgagggatatacattccgttcaacagaaaaaatggaaggtgtgcccgaccatgaaaatttgaatatgcacacattcgttcctgaaaatgtaaaagcacaattgatgaaacaatacaaacacccgattcacaaagaattggaagaaatggctaaaaaggtaggcggacacggaggaatggacttcatcatggactatcgtctgatttattgcttacgcaacggcttacctcttgatcaggacgtttatgatgctgctgaatggtcttgcattggtgaattaaccaacatttcaatccaaaacaacagtatgcctgttgaagttcccgatttcactcgcggaagctggaaaaaactgaacggatatcaccactacatggttggcgaataatatatcaacgctaaaaaaactcccagtcaaaaaaatgattgggagttttttattatatcctatattctcaaaaataaatcacaatatttttataattaggcaattttcactatctttgttgccacataccattaaggggtagacttggatttgacagcatgaagaataggtatgtaagcatgtcgggagcagtgaaacggcccgtaaatcccggacacaaaattttaattggcgaaactaattacgctctcgctgcctaatctttagaagattcggggcttaatctctgctcaaggagcggagacgagacatcccgccggtggttccaccttattccggccggcaaatggggtgcagtcaatataaggttagcctgaaccggcttcgggggaaaggcgaaattttagaagctaagcgatagcttgggtgcctctttccggtctatcgatgaaaaccaacaagcggctaagcatgtagaaagcatattgattccgtgtttggaccagggttcgaaaccctgctactccacaaaaaatcaaaacattacaaagaaatagcactctgaataacacaaaacagagtgctatttttttcgtgtaaaatccgaagtttttcgctatatttgttgtaataaagtattttccctttgaattcgctaatgcagaagctagattcatcatgtctgttgaagttaatccgtgttttttacgactctttgacaccaaaccattcaattcaacttgaggaagtcggaaaaaaatcaaagaaaaattataaaaacgcttggtttgcaactattaaatagttacatttacataaaccttttgattatgggtacaaaggaaaagttgatagaacgatttaaaagtcagccgaaagattttaactgggatgagcttgtacgcttgttcgccattttaggatataagatggataacaaaggcaaaacaagcggttcacgtgtcattttcattaaagaggaaagctcatacgttgcacccaaaccgcatcccggaagtatcgtaaaaggttatgtaatgaagcaggtatttgaatttctgactaaaaacaaattgatatgaaaacattgacttacaagggttacattggaagcattgaaataagcgatgaagataattgtctgtttgggaaagtccttgatttgcctaaagatactgtgatttcgtatgaaggcgaaaccgtttctgaattgaaagaggattttaaaggagcggtggatgattatatagcatattgcaaagaggcaggaataacaccacgcaaaagttattcgggctctctaaatatacgtatttcccccgaggtacatagtaaaattgccattcttgcccaacaagccggaatatcgataaactcttttattaaagcagctgtagaaaagcaagtcgcagcaatgttgtgaatgcacttggcatgaaagtggaagttgtcaaacctattaatgaaaaacaactaacacgtatacaagagccatgtgtcacccagggttcgaacccctgctactccacaaaaaataataatttatacgaaagcctccgatattttaaagaaaaatatcggaggctttcgtataacttgaacaaaatcaagataaaatacctatttcatataaaaaatcttataataatctgtattctccagtatttatatcaatctcatactttttcacttccctacttccatcgtaatttaccgcacaagcatcaacaacaaacacatcacccttaaattctgttttataagtaatcttaggagcatgatcatttataacctttcctatcggcaaatcaattttccatgcataaccactactatgtttattgacactgcatctactcaaacttattgattcaatattaggttcgtcaagtacaaagtcatataaagacacaggagttaccgataaacccaaactagacatcccttcattcgacaataaaatgtcgttctcaatctggcaaatatcattgccctttgcatctacaatatagcaacatgtattaccggcactaaccccatgagctctcgaaatgacataacaaccatcaacccatagcctttgaacccattcaaaatttccatactcttttccgtctttccaaccaacatggtatgtcaaattaccatcacttgagaaaataagaccaaacacacttacatcatttaaaaatgttgaaatttgacataaaaaagtaccggtattatattgccaaatccttgtaaaactataagaattttcagaaagaataaaggtcaattcttttccatatcctaatactatagggaacgtatccctcaaaatatcacgagatagatattcctctataatatttatctcgtcatctttagaaatatcaaacaaacaacaccaaaaccttcccaacttacacccccaactaccacctaatgtatcaccacaagtatatactttcgcaaagtcttttactatcaaccctactgaatcttgcactgcttctttaattctctctaaacttaagggcttttgcacaatcgtatcagtagtcaccctatcctcattgtctgaacatgcaaacagcatagcaaacaaaccaattaaaaaaaatatttttttcatatcaatgtttttagaaatcactatttattaccaaacacaaatataacaacaaatcactatcaagacaaaaaatatctaatttttttaagtaaaaccatactactttgtaataaaacaacaaataaatttattacaattattcatattattgccacatttgcgatgttattaagtccaaggcattatgcattacaaatcaattaaaagaaggtttatattcaaaaaaaatatcgaagtaatagttgagcatatagagaaaaatctgagtactgtattaaaaacaccccaccgttactgcaggtaacaacacaaaggaaatagagaacgatatgaaaaagaaaatagatttatatttaaaatacatcccctatccatatgaagcattatccgaagaatttgaattgaaattcaaaacagatacagctatgtttatcaattattacagcaatttactccgatcacaaaatacaccaagaagaagggctgctttcgcagccctttccttaatatttttcccaaaccgatatgttaacctaaataggttttcagcaatttgcttctggaggagtgtcttaaacgacggattgccttctccttgatttggcgtacacgttctcgagtcaaaccgaatttctctcctatttcttccagagtcatttcttgtgtattgatgccaaaaaacaatttgatgatatcccgttcacgctccgtaagtgttgacaatgcccgctctacttctgttgaaagagattcgttgatcaacgtacggtcagccacaggcgaatcgtcatttaccaacacatccagcaagctattatcctccccttccacaaatggagcatccactgaaatgtgacgtccagacacacgcagtgtatctgcaaccttctctgccggcaaatccaaagactcagccaattcttccggtgacggacgacgctcgttttcctgctcaaatcgcgaaaacgctttattaatcttgttcagagaaccaacctggttcaaaggcaagcgtactatacgcgattgttctgccaaagcctgcaaaatcgactgacgaatccaccacacggcataagaaataaacttaaaaccgcgagtttcatcaaacttctcagctgcctttatcaatcctaagtttccttcattaataaggtcaggcaaactcaatccttgattttgatactgtttggccacagaaacaacaaacctcaggttcgcccgtgtcaacttctccaatgccttctgatcacccttccggatacgttgagccagctcaacttcttcctctacggttatcagatcctctttaccaatctcctgcaaatacttgtccagcgaagcgctttccctgttggtaattgattttgtgatttttagttgtctcatactgtatatttataccactgcaaacgttttgcaaaggtacgactttttattcatttttcaatccggtattttactctaccggcaatgattaacattatttaattcaataaggagaacgcaaaatattcgaccctacctctaggactcactgctgtaacaaatacgccctcgtctccagcagattttattgcacgttccaagtcttctgcattatacacgaccgtattattgattttaacaataatataaccttcggtcaaccctgcctctttaaattttccattctttaacatgacaatcttaactcccttcgtcagacggtaacgatactgctcgtctttcgtcaaagattccacctgtgcacctaaaattcccgactcggtggaaaccgttacatcaccaaaaacattctgcaaagtaacatccacctcccgcatttttccgtctcgactaaaagaaaccttgacaatatctcccggcgcatacttggccaactgctcttgcaactgcggagcagtcacaacatcatagccattgatttggataattacatcaccacttttcaaaccggcctttgaagctgctcctccggaaataacctctgcaacataaatgccagaagtttccttcaaacctatcttcttggccaattccggcgtcaattcgcgcatagaaacccccaatacggcacgctgcactttaccgaactccttcaaatcactgaccaccttacgcgccacatttaccggcactgcgaacgaatagccagaataactacccgtaggcgactgtatggctgtatttatacctatcaattcccctttggcattcaccaaagcaccaccactattacccggattcacggcagcatcagtctgcaaaaaagactccagattcattttattccccaatccacgagccttggcactgataattcctgctgtaaccgtcgaggtcagattataaggattaccaacagccaatacccactctcctaatacaacatcatcagaattaccgtactctattggctgcaaaccagtagcatcaatcttcaacaaggcaatatccgtatccggatccgtaccaattaattttgcctcgaattttcgcttgtcattcaaagtaaccatcactttatcgctttgggctacgacatgattattcgtaattatatatccatcctccgtaataatcacacctgagcctatgcccatatctaacggttcttcccgaattcggccatttcgtcctccaaaccaaaaatccaacggacttccataataaacacgccccatttgtaccggcgtaacattcacaactgctggaactgtctttttggcagcctctcgcaaatcaacactaccaccaacagccaaaggctgagcagggtttgctgtctggacaaccggacgactaactccaggtcctacaatatcatgctgaacaacaggaacctcatttctgtcaaccaacaggttgcctcctacaaatgcaatcaaaccgccagccaagccgaatgcaaaaggtagaacgtaatttgttgctttcatatttcctaattttaatatcacttgttttacaatatcattttcaccaatagaatataacaaaccctttgccaggctgctattaataaaatcttaattagcaatgcttaacatccctaacatgtccctaacacattcatgccccatctacagcttatctaaatcaagaccatataaaaagctattaaaaccctattcaaaagttatatcaaagctatgaatataggattcatatagcattcatataggatttatataagatttaatatagataagatatagatttgacttagattatccccggatatattcatggcttgtctatacaaaaaaaatccggatatcggcatcaccgacatccggattaatcattatcacaaactacatacacctatttttgtttagccgcatccagcaagcttccttcgaactctgccactatattagcttttgataaaaaatacagcattttatcttttaccttataattatctaccgtttccaacatctgaaaaaattcaaactcccaatcagaatcattaggacaagccatccgggttgcacccatcggaaagaacttcaactttgcatccgtcatttcataatcgccaaagaaacgattacatgcagcacgcccgttcactcgctttgcaacatcatcgaacagaataaaaatcttattttcaggatcactcaagaccacttctttattattcaaaacttttaactcccacttcactccatccaacttcactacctcttttttggatttacatccactcacccccatcagggtcacgcataacaatataataaatgatttcataattctacttttttcaatgtttactgaaatgtaacaaaattcatgccatttcacaaacacaatagctctctctacgagaagactttaaatttacatcagcagaattattttaaaaaattgttccccattaaagagaaaattacgtaattgctttgtatatttgtggcttatttgaagaatatcattattatcaataattacaaattatcatgtccaaggtaatcaaattaaaaaaaggccttgatatcaaactgaatggagcagcagataaggtggtgcaaacgttgggaaatccttctcattgtgctttaaagcccaccgatttcagagttttagttcctagattggcagtcaaggtcggcgatgaagtgaaggcgggagatgttttgtttatagacaaagctcgtccggaaatcaagttcacgtcacctgtcagcggaacaattgaagaaatcaaacgcggagaacggcgtaaacttctggaagttgttgttaaagctgacacagaaacccgttatcatgattttggtaaagttgaaatcaacaaacttaaacgggaagaaatcattaaccggatgttagaaggcggtgtatggcctatggtgaaacaacgcccatacgacatcattgctaatccgacaacaacaccgaaagctattttcgtatccggattcgacagcgcaccattagcccctgactacgagttcatattgaatggtcaagagcatgatttacaaactggttttgattgtctttccaaactctgcaacaagaatgtaaatctcaacttggaagcaggtactccctcggcttcagtatttacaaagttgaaaaacgtagaaatcaattatttcagcggtcctcatccttgtggcaatgtcggaattcaaatcaatcacttgaatccgataaacaaaggtgaattagtatgggttgtaaacatacaggatgtagccatcatcggacgtttattcaatgaaggacgtttcgatgcccgcaaaataattgcagttgcaggctcagaagttaacaaaccgttatattatcatactgttttaggagtatcaatcgcaaatattctggatggcaagttaaagaaacaggttgatgaacgtatcatttctggaaacgttcttaccggcactcaagttgaagccaatggctatctgggatattatgacaatcttatcacagtgataccagaaggtaatcattatgaatttttaggttgggcagcccccggcttcaataaattctcagcatccaaattattcccttctttcttatgtcctaaaaagcactacactttggataccaacttccatggagaacgtagagcttttgttgtatccggacaatacgaacaggtattcccgatggatatttatccggtgtacttattaaaagctattttagctcatgacatcgatcaaatggagcagttgggaatctatgaagttgttccggaagatatggcattatgcgaatttgtctgtacgtctaaaacaccggtacaacagattgtcagcgaaggtatcgaactgatgatgaaagaaacgaattagttagcatgttgatagttcctgtcaacaagtttgagaaatgaaaaaacaaatagaatatgaattttttacgaaattttctagataagcaaaaacctaaatttgaaaaaggaggcaaactggaaaaattgcattctgttttcacggggtttgagtcttttcttttcgtgcctaatcaaacaacttccaacggagcgcacatccgggacgctgttgatttgaaaagaaccatgattatcgtggtgttggcactggtaccagccttattgttcggtatctacaacgtaggctaccaacacttcctggcaacaggagccttggaaggagcatcattctgccagttgtttttctatggtttgtggaaagtgctcccaatgattattgtttcgtatgtagtcggattaggaattgaatttgccgtagcccaaatgaaaggacacgaaatcaatgaaggattccttgtttccggtctgttaattcctatgattatgccggtagaggctcctctgtggatgatagccctctcgactgcttttgcggtaatcatcggtaaagagattttcggaggaacaggtatgaatatctggaacccggcacttctggcacgcgcattctttttcttcgcttatccatcccagatttcaggagataaagtatggattgccagcgatactgcagatgcaatatcacaagctactccccttgcacaaatggctctgggacaaccgctgagctatagcacagcagacatgttctggggattcattccaggctctgtaggagaaacctctactttctgcatcctaatcggtgcggttatcttattattaaccaatgtagccagctggcgtacgatgttatctgtatttgtcggcggtttcgttatggcatgggcattccagccggtatccaatatcgaggcattccagcaattattaatgggaggatttgcatttggagccgtatttatggcaacagaccctgttacatctgcacagaccaatacaggtaaatacatctatggtcttctgattggcgctatggctgttatcatccgttgcatcaacccgggctatccggaaggtatgatgttggcaatcttgttgatgaacacctttgcaccgttgattgactggttcgtagttcaatccaatatcaaacggcgattgaagagagccaaagcagttgttaaaatctaaaatcaataactatgaataaacaaggaaatacatatacattcctgtattcagtgattctggtagtagttgttgccgcattactgtctattgtttctctttctcttcaaccgcgtcaggatgaaaaccgccaaaacgagaaacgccagaacatactgagtgcaattcacatcgcttctactgcagaaacttcggcagagctgttcaataaatatattaaagaacaattcatactgaatgcaaaaggagaaaaaattgaaggcaaggctttcgatatagacattgccaaagaatacaaaaaagcggcaaatgagcgtgaattaccggtattcgttgccagtgtaaatgacacaacgaaatacatccttcctatatatggagccggtttgtggggacctatttggggttacatttctttagatgaaaacaaaaccaccgtttatggaacattctttgaccatagcggcgaaaccccgggattgggagctgaaattacgactcctaaattcaatgaaccattcaagggtaaggagattttctccggtgagcaactgacttctatccgcattatcaagggtggaaatgccagtggttccaacgaggtggatgctatctccggaggtactattacttcacaaggagtagaagctatgcttaagaattaccttacttattacgaaccgtttttaaaacaaagataaaatgagcgcattattttcagcaaagaaccgtgagtttctcctcggtccactgagcaagaacaatccggtaatcgtacaggtgctgggtatctgttctgctctagccgttactgcgaagctggaaccagccatcgtgatgggactttcagtaaccgctgtaaccgcattctcgaatgtgattctttcgttactacgaaataccattccgacccgtatccgtattatcgtgcaattagtggtagttgcagccctggtaatcattgttgaccagcttctgaaggcatatgcctatgaagtaagcaaacaactttctgtatatgtcggattgattatcaccaactgtatcatcatgggacgtatcgaggcttttgcattggcaaacaaaccttggccttctctattagatggtatcggtaatggtttgggttacactgtaatattagtaaccattgcatttttccgtgaattgttcggttccggaagtttgttcggttgccgtattatccccgaatcatggtacatcgctaatggcggattctactcaaataacggcttgatgattatgccagccatggcattgattcttgttggtctgattatttgggcacaccgttctaaaaacaaagatttaatagaaaaataatttaagatactgatatatggaaaatctattaaatatattcgtccgttccatctttattgacaatatgattttcgcatacttcttaggtatgtgttcatacttggctgtatcgaaaacggtaaagacctcattcggtctgggtattgcagtaatcttcgtgttgttgatcaccgtaccggtaaactatttattggacaacttcgtattgaaagccggagcattggaatggttgttgggagctgatgcagcaaccattgacctgagtttcttgagcttcatcatgtttatcgctatcattgccgcaatggttcaattagtggaaatgattgttgaaaagtttgctcccgccctgtacaaccagttgggtattttccttcccttgattgcagtaaactgtgccatcatgggagcatccctgtttatgcagcagcgtgattatgccagtgtatgggaagcaaccacattcggtttaggttcaggtatcggctggatgcttgcaattgtatgtattgctgccatccgtgagaaattaaaatactccgatatccctgcccctctgcgtggaatcggtattacatttatcgtaaccggtctaatggctatttcttttatgagcttcttgggtatcgacctcagcaaactgaaaccacagccagtaaaaacagaagctacagcacaaattacgccaagcgaaacaaccgaatcatctattgatatgacagtggctgccaaagcggaataatttaaaacataaatttaaaactaaaacgagatgatcatattagcaataaatacagcaatcattactgccggcatcgtggtgttcttgattgttacgttgattctggtgggtattctcttgtttgcgaaagcaaaactgaccgccaaaggcaacgtacaagtgagcatcaacaatggtgagcgagtagtaacaaccgaacctggaagttctttgcttgccacactaggtagtcaaaagattttccttccatcagcttgtggaggaaaaggttcatgcggtatgtgtaaatgccaggttgactcgggagcaggttcaattctcccgacagaaaccggattcttttcatacaagcaacagcacgaggattggcgtcttgcttgtcaggtaaaagtaaaggaaaatattgaaatgcgcattccggaatccatccttggtattaagaaatgggaatgtacagtggtatccaaccgcaatatttcaacattcttgaaagaattcgtcgtaaaattaccagaaggagaacacctgaaattcaaatcaggaggttatatccaaattgacgtaccggcattagatgttgatttcaaggacatggatattgacgaacgctataaaggcgattgggaacggatgaaaatgtttgaccttaaaatgcataatccggaacctacctaccgtgcatactcaatggccaactctcctgcggaaggcaatattattatgttgaatatccgtattgcaactcctccattcgatcgtgctacaggcagctttatgccggtaaatccaggggtttgctcttcgttcatattctctcgcaaaccgggtgacaaggtgactatttctggtccttacggagaattcttcctgcgtgagactaacaatgaaatgatgtttatcggtggtggtgccggtatggctccgatgcgttcgcatatcttcaacctgttccatacaatgcatacagatcgcaaggtaaccttctggtatggagcacgtgctctgaaagaagctccttatgttgatgaattcaataagatacaggaagagaatcctaatttccactggacattggctcttgacaaaccggatccagaagcagatgcagcaggagtagcttacaaaccgggatttgtacatcaggtgattttcgagaactatctgaaaaaccacgaaaatccagaagatattgaatactatttgtgtggacctccaatgatgattcaggcagttaccaaaatgctttatgatcttggtgttccagacgaaaatgtcatgtacgataatttcggaggataatataaaacccctgttgccaggggttttatagtttatatacctagtgtaaccaaaataaataattatggaaaacccttttgaaaacaagccgaaacgccccacttttatcactgtactttgcatattgacctttatcggaagcggttggggaaccatatccaacctaatatcaatatttacctataatatcggcaatacactaatacagatcgaacaaatagccaatgctaccgaaaatttagatgggaacgcaacatttatgaacggatttttcaattcatcaatagaagtactaaaggcaatggcagagcatggcaaggaaatcgcgattatcaacttgatgttatgtttattgagccttatcggtgccattctaatgttcaacctgcgcagatttggcttttatttctatactacagcacaatgcctgatgcttttcgtaacgccctacttcgtcggatttgcgccattcatttggatcggtatgatttcgtcagccgtacctacggtagtctttatcattttatatgccgtcaatttaaaacatatgcactgattttactttcaattatgaatcaaagtagaaataaaagctacaaataccttgcattccaacaggaattaatataaatttgacacaaaatatttaactaccatactatgaaaagagatacagtaatatttgatttaattcaaaaagaaagagaacgtcaacaggaaggaatagagttgattgcttctgaaaactttgtaagtgatgaagtaatggaagctatgggttcctgccttaccaataaatatgcagaaggttatcctggagcacgttattatggcggttgccaaatcgtagaccagacagaacaattggcaattgagcgtgcttgtaaattgtttggagctgaatacgctaacgttcagccacactcaggagctcaagccaatgcagccgtattcttcgcctgcatgaaaccgggagatacctatttaggtcttgacttggctcacggaggtcacctttcacacggatctccagttaacttgtcaggaatcaactatcatccgattgcataccatgtaaaagaagataccgggatggtggattatgacgaaatggaagcatttgctttagaacacaaacctaaaatgattgtatctggagcatccgcatattcacgtgactgggatttcaagcgtatgcgtgaaattgcagacaaagtaggcgctttattaatgtacgatatggcacacccagcaggtttgattgctaaaggtcttttgaacaatccgttcgaatattgccatattgtaacgacaacaacacacaaaacattgcgtggaccgcgaggtggtatgattctgttaccaaaagatttccagaatccatggggattgaaaacgccgaagggtgaaatcaaaatgatgtcacaagtgttgaatttcgcagtattcccaggacagcaaggaggaccgctggaacatgtcattgcagctaaagctgtagctttcgaagaagcattgtctgattcttatttggaatatgctaaacaaatgcagaaaaatgcgaaagtaatggctcaggcatttattgacaaaggttataaagttgtttctggaggtacagacaaccattgcatgctgattgacttgcgcaccaagttcccggaattgaccggtaaaaaggctgaaaataccttggtaaaagcagacatcaccatcaataaaaatatggtgccgtttgatactcgctctccgttccagacatcaggaatccgtgtaggaacaccagccatcactactcgtggattgaaagaggaagacatgaaagttatcgtagacatgattgaccgcattctttccaacccggatgatgaagcaaccattgcagctgtgaagaaagaggtaaatgcaatgatgcataaccgcccgatgttcgcatggtaataacatttgcacataacaataaaaccgggaggcttccaaaaggcttcccggtttcgtttaaccaataaaatataaaaaaaagacttgatgagttttatccctcctgtacaattagttatttttgatttagacgggacattgctaaatacaattgacgatttggcaacaagtaccaatcatgccttagaatattatggctatccaaagcatgcactgagtgaatacccattctttgtaggtaatggcattaccaaattaattgaaagagccttaccggcagaagcccgcacagctactatcatcgcaaaggttcgggaagaatttgtacgctattatcaacagcataaaacagatttatctcgagtctaccctggaatcacagaactgctaaaagctttacaccaagcaggtgtcaaactagcagtggcttccaataaatatcaccagggaacggttgaattaatccaccatttctttggagaacatctgtttgatgttgtgttaggacaacgagaaaatattccgacaaagccagacccaagtatcatttatgaaatattggaacaaacaaaaataaatccggcacacactctctatattggagattcgggagtagatatgcaaacagccttaaacagtggcatcacttctattggtgtaaattggggattcagacccgaagaagaattaaaacaaaatagagcctgctacattgcaaaagaagtttcagatatcgctaaaattgcgggaataagcttatgagcctatcccgtaattacttctgcccccgtttcagttatcaaaacagtgtattcccattgagcagatggcataccatcttctgtcaagaccgtccaatcatcatcggcatcaacatatatcttgcgtgatcccatattaatcatcggttctatggtaaaaaccattcccggaaccaataacattccttttccccgccgcccaacatgactgacaaaaggatcttcatgaaaacgcaaacctacaccatgaccaccatactcccgcacaacagagaagccgtttgcttcagcatgttcttgaacagcagcaccaatatctcctaaaaatctccatggacgtgcagcttcgaaaccacgcaacaagcattctcgggccgtttctaccaaatgacgacactcatcacttaccttgccaatcataaacatacgtgaggcatcagaatagtaacctcccaaaatagtcgatacatcaacattgacaatatctccttcttgcaatattactttttcggaagggataccatgacatacttcctcattaacagaagtacaaacacttttaggaaaaccttcataattcaatggtgcaggtatcgctccatgagacacagtataatcatacaccattttatcaatttcagcagttgtcattcctgcacatatacgagaagctacatagtccaaaacacctgtattcacctctgcacttttgcgaataccttcaatctgagcttctgtttttatcaatttacgaggcggaacctgataacctttcgctttatactctttgattttctgctctatcgcagcccttttagcagcctcttctggagaaagcggctctttcattctgaataaatgcatcacttatctaaattaataacacacaaagttattaatattcaaagcaaacacaaagtatttatgagattttcctaagataccacttcaatgtaaatacagcagataaaaaagccagaacatcagagattggcatgctccaccatactccatatatattccaatcagcaatataaggaagtgtataaagaagtggcaataaaaacaataattgacgcgccaatgacaacaaaatagaaatttgcgccttacctattgactgaaaaaaatttgtaatgactacttgagctccaacaagagggaaacaaagaatcgctattcttaaacctgatgatgccaatccatttaaagcagcatcatcagaaaacattcctactatgcttatagggaataattcactcaataaccatcctatcgtcataatactcacagcgacacctatcactctatgcaatgtctgccgcaccctgtcaaaatgctctgcaccataattatatccaacaataggctgcattccttgagtcaatcctataataaccatcaaaaaaagtgtcgcaatcctattcacaataccatatgctccaatagcaagatctcctccataagttttaaaactatgattaacaacaatcacgattgctgctgcacaaacattaatcaaaaatggagccatccctactgaaaatatagcagcaactatcttgattcgcaagtaataatacccccgtttaaaatgaatataactagacgaactaaaaaaatgttttaacacccaaaataatccacaagtttgcgacaaaatggttgccgttgcagccccccgaatcccccaaccaaaataaaaaataaaaattgaagccaagaccagattcactccaactgttaacaaagaggacaacatcgctttttgaggataaccggttgcacgcatcacattatttaatcctataaaaagaaaggatataacatttcccatcaatatcaccttcataaaatcacgtgcatagggtaaggtagcttcacttgctccaaaaaaaataagaatttcatctaaaaaataataggtcaaactaccaaaacaaatccctgcaacaatacataaaaacaatacattatgcaatacctctgttgctttattatcatcttttcgacctaaataaatagaactaatagcagcacctcccacaccgattagtgtacaaaatgctataaccaaattcattaatgggaaagttaaggccaaaccagaaatagccaaaggtcctataccatgtccgataaaaatactgtcaataatattatacaatgaagttactgtcatcgcaataatggcaggaattgaatactgcaacaataatttaccaattggagctgtttccaatatatgtggactcttacttgctaccataaagaaaagcactttaccgatatctcctcagatatgactcaaattaatcgcacgaaaataaacaaaattcgctatctttgtacttcctataccaaaaaccttaaataatatgctattcaccaaaaaatacatcctgcgagttgccggtcctatacttgtaagtctactgatggaacatcttatcggaatgacagacacagcattcctcggccgggttggagagattgaattaggcgcctctgccatagcaggtatctactacttagccatattcatgctaggctttggatttagtataggagtacaaattttaatcggacgtcgaaacggtgaaaaaaactatgcggctatcggacctattttcacgcagggattgctattccaacttaccttagcagcccttcttttcggaatgtcacattgggtatctcctattattttaaaatccattttacaatcagaacatatatacgaagctacattaagatatctagattggcgcgtttacggcttctttttttctttcacagcatttatgttccgggcattttatgtcggaattgctaatacaaaaacgttaaccatgaactctatagtcatggtcggcacaaacattttactcaattacatcttaattttcggcaaatttggcttaccggccctaggcatcgcaggagcggctattgctagtagtatatcagaaatggtgtctcttatattttttatcatatacactagaacaaaaattgactacaaacgctacgatctatttcacttttcaaaattacagcctcacttacttaagcgtattttaaatatttcaatttggaccatgatacaagcatttatctccattagtacttggtttctttttttcatcgctatagaacatctcggagaacgttcattagctattacaaatgtattacgcaatgtatcatcatttttcttcatcattgtcagtgcttttgccacagcagccagttcattggtcagcaacttgatgggagcaggacaacaagaagaagttattccaacctgcaaggctgttagcatagtatgctattgctttgttttacccctaattttattaatggcactatttccacaaacaatcatgcgcatatatacagataacaaagaattaatccaaacagctgtaccatcgttttatgtcatgatttgcgtctacctcatcagtgttccagcaaacatcatgttcaatgctgtttccggaaccggaaacactcgtatatcactatggattgaactttttgctttagttggctatgtttctgcagtagtttatatcgttatgattctacgggccaatattgccatttgctggacaacagaatatgtgtaccttctttttatgggaagtcttgcctgctggtatatgtacagcgggaaatggaaattaaataaaatataaccagtctgttagcagtcgagaactaatccattcacttaataaataaccaggatgtcttcgaatacacaaccaatcattatccaaatccataatagcctgataacaatctttttgtaaagactttttttctgccaacaattgttccaatggggaattaaattttattctctttttcatcatcatgcatttgaaaagatcttataatcaaattaataaacactagtcgaattttatatcgagccaaaatagaacacatcgtcaaaagaagataaagtccacctaccactaaaaaacccaaagccacattatttagcaaatttccaagaaaaaatcctagagctacaaacaaaaacaatacagtgaaaaaagcaaacaacaatataactaaaccataagataaaaatgccagcactcgtgctattttctctacaactgtcagcctcagtattctaattttcaaatctataaatactgtaatatcatctcttactttcttcagaatttgctcagcatcgttctccatccctactcctccctagttctcgacatctactttcgacttcagtatctccaattcattacgcaaagctctcaattcatcctcccattcttcaactttcacctctgcacgttctgcgtaatcacaaacatttgcagctgcctttcttctcatcttagaaaatgcagagcgcacaccctccttaattccatcgcccatttcatgcatattgtcgcctaattttttcctgttatcatctgttaccaaataaccaacaacaaccccaaccaaggttccaacgcctaatcccaataacaattttgaagtttcgtctttcataatacctgtattttaaatatacagtgtatacgactctttcatacaaatagtttcaaaataaatatttcaatcacgactgctacctcctgcaatatccaataattcagaagttattccttgttgacgcaacttattatactccaattgtaatccacttaataatttgattgcattatcattagccatttgcattgctaaaatccgagcagcttgttctgaagtacggctagacatatacatttcatacatttgtgcattcaaaagcaatggatatatagtctctaaaatttgcaccgccccgggctccaaaatataccacggcatattttcagaagataacttaactgattcaacgtctgcatccaacgttacaggcaagaaacaccttaaacgcaggaattgtacccccatacttttatagtaggtatataacacttcaaccttatcatagtatccgcttaaaaaatctttctgcaaaatagcaaccaattgacgagttgctgtaacgaaatctttaatttcaaatgcctctggatgtcctataattgaaatacccttgattttatgaatatcagactggatcttcttgccaatagcaattacatgaatattcaatacaccttccctacgatacttttctataacttctgacaactttttataaattgctaaattaaaagctccgcagagaccatcatctgatgcaaaaactactaaagcaactcttttaaccgttcgaacttccgctaacggagaaatatattcttgattagaattacgcatgtgagaatatatttcccaaagcttttgttgataaggtctagcttgaatcaactgattttcggcttttcgcaaacgggccgatgaaatcattttcattgctcctgtaattttttgggaagaatgtactgagttaatccttcccttcaattcacgcattgtagccattacatttgatttaaattatcattaaacttgtctgccacttctttagcgacatctatcaataatgtttcaatcttatcatctaaatgcccaatcttcaactcatccaaaacctcttttctataacgagaacgcatgatttccaaaaaatatttttcaaattctgcaactttgcggagaggtatatgctgcaacaaccctttcgttccgcaatatattatagcaatctcttcttcgaccggcatcggtgaatattgaggctggattaacaatctggaattctttttccctttatctattaccatttgagtaacagcgtccaagtcacttccaaatttagaaaaagactccaattcgcgatactgtgcctgatcaatttttagagtaccagcaacctttttcattgctttcaactgagcattacctcctacacgagaaacagatacaccaacattaattgcaggacgtattccttcattaaataatgatgtttccaaaaaaatctgtccatctgtaatagaaatgacattggtcggaatatatgctgaaacatcccccgcttgagtttcaataatcggcagagccgtaagcgaacctcctccttttacaacaggctttaaagccttaggcaaatcattcattgttgcagcaacttcatcatttgaaataatcttagcagcacgttccagtagtctagaatgcaaatagaatatatccccaggatatgcttcacgcccagaaggacgacgcaaaatcaaagaaatctcacgatatgcaacagcctgttttgacaaatcatcatatacaaccaatgcatggaatccacgatcacggaaatactctcctatcgtagctcctgcaaaaggagcataataacgcattgcagcagaatctgatgcattagcagccaacacaaccgtatattccaaggctccatgcgtacgcaaagtattcactaaagcagcaacagatgaagctttttgaccgattgctacgtaaatacaatatacaggatttccctgacggaaattttctctctgattcaatatcgtatcaattgctatagatgtttttcctgtttggcggtcaccaataatcaattcacgctgtcccctcccaataggtaccattgaatccactgcctttataccagtctgcaaaggttctttcacaggttggcgataaattaccccaggagctttacgctccaaaggcaaatacatcctctcgccttttatcggtccggcaccatcaatcggttctcccaatgtattaattacgcgccccaacaaatcatcacacacaccgatagaagctatgtgacctgtccgtttcgctgtaaaattttcttttacacgatcagctgcgttcaataaaacaataccaacttgatcttcttccagattcatagcaactcctcgaactccattttcaaactcaatcaactctcccgatgaaacattatcaaggccaaaaacttttgctactccatcccctacttccaaaacagtaccgatttcttcgaattcagccctcatatcaacttgttccaacttttgttgaagaagatcagaagtctcacttggttttaatatcataattatcgtctttattcattatacactattgaactaactgtctcattagttcccgcaattctctacttacagaacaatccaattgcttagaatttatttgtaaaataaaaccaccaacaagagaaggatctatttgttctacatactccaattcacgaaactcacaatctgccaccatcttctttatacgctctaacgtcaatttgtccaatggtgcagccgaaacaatttttacacgcccgatgttatatttttttcgataaagatgctgatacatcaaacaaatcgaacgtacatacatctcgcgatgattcgctataagcagacgtatacctctcgtatacaactcactattctctattcctattgccgttgttaataaagattctttatcacgaggagaaagtatcggattaagcaacgctttgtgaagatcaggatgggcgatataattctgttcaaacaatttcaattgctcgtaaacatctttagcagcatccaatttttgtgcaactttcaacattgccattgcataacgtctcgctattaacccttcattcatatcaatgcctcctgttaattagttctcaattcatccagcatcttattaactaatttaacctgctctgcatcatcagccaacttctctcgcaatacttttccggcaatttccaacgaaagagaactaacctgtttacgcaactgcaattccgcttcacgcttagcctgctctatagacaactgcgcagcctccataacttttttagcttcttgagccgcctccttacgagcattatcaatcaaagtctgcttcaatcgttctgtctcttgcaaagattccaattgcttacgatgagcttcttccagcatacttttaatttttgcatttgcattgttcaactcatcttgagctagttgtgcattcttcacgccactatcaataaattctgctctctgttctatgctgcggataattacaggccatgcaaattttgccaagatgccaagaattatcaaaaaaactacgagcatccaaaacattaacccgaattccggttgaaagagttccataatttatacaaacaaagccaagatacatacaataatagcaaacaaagcaaccccctctatcaaagcagcgatcacaatcatatttgttcgaatattacccgtttgttccggttgacgagcgattgcatccatagcactagatccaatcttaccgatacctattcctgcaccaattgctacaattcctgcaccgattgcagctccaacttttgccaggcctacacctgccactgcttgtaataaaaccatacttaacatagcttacttttttaatagttcattatttatttaattctataattgttcctcttcattagtcactgccaaggaaataaaaatggttgaaagcataaaaaacacatacgcctgtataaaacagatcattaaatcaacaaatcccataaatgttgcaaacactactgaaataaatgtagtacctgccatcgcagccattcccaatgatgacataataaaaatcaaggaaattaacaccaatgtaatcatatgcccacccatcatatttgcaaacaaacgaatcattaaagctatcggttttgtcaacacaccaaaaatttcaataataggcatcattggcactggacactttaaccaagtgggcacatttggccaaaatatctctttccagtaatgtttacgtccggaaaaattcaccacaacaaacgtacataacgacaataccaaggttatggaaatattccccatcagattcgcacctccaggaaaaatgaccatcaatcccattagattagcaactaatataaagaaaaagactgtcaatagataaggggcaaaacgacgggcattacttcccaatacagatactatcacatccttgtagagcatttccacaatcacttccatcacaccattcattttacgaggagctatcagcggatattttttataccaacgaacaagcggaaataatagtccacacataacaacagcacatatcatcaaagccaatacatttttcgtaattgaaaaatcccacggacgatattcagcaccatttgttcctacagcaacaactttaccggcataatctcctctgtcagccaaataaaatccctcataattaccaccattttgcaaacgagaagagctaaacacataccaatctcctgtttctgaacatacaataactggaagtgaaacatgtaaatcccagatattccatccatatttatcacccagatgctcaaaaatagttccttttgggtcaaatgtttcttgcctaccattctctgcatataccacagaggcaaacaacaacaaacttaccaacaatatatatcttgaaatcttcattaacagctacattttcaattaatacaaactacaacctgattgtccaaaacttcaaccacaccagaatcaacacacacttccttctctccttttcctgtttcataaacaatttctccatgagtcaatgtagatatcaaaggagcatggtggtccaatacagtaaaagttcccaacgatccaggcaaggtcacccgcagcacatctcccttaaacaacactttttcagcagatattatttccagtttcataacctctccattaattatttgaccattattttatgctttctgtacatcctccatcatttgcttaccctttttgataacatcatctattgtaccggcattcatgaaagcttgttcgggatattcatccatatctccgttcaaaatcattttaaagccacgaattgtttcctctatcggaaccatcacacctggcagccctgtaaattgttctgccacatgaaatggctgagacaaaaagcgttgagcccttctagctctattaacaaccaacttatcactatcagacaactcatctatccctaaaatggcgataatatcttgcaactcttgataatgctgtaacaactcgattacctgctgagcagtttcataatgctccactccaacaatatgcggatccaatatccgagaagatgattccaacggatcaactgccggataaatccccaactcggtaatcttacgactcaaaacggttgtagcatccaaaaagttgaatgtcgtcgcaggagccggatctgttaagtcgtctgccgggacataaatagcctgcacagaagttattgaaccatattttgttgatgcaatacgttcctgtaatttacccatttctgaagccagtgtcggttggtatcccaccgccgatggcattctacccaataaagcagatacctcagacccagcctgcgtaaaacggaaaatattatcaataaaaaacaatatctctttacctccatcatttgaatccctaaatgcttcggcaactgtcaagcctgacaaagcaactcgcaaacgtgcaccgggaggttcattcatctgcccaaatattaatgtcgcctgagattgctccaactgacttttatccacactatttacatcccatttaccattctgcatttcctcttgaaatttctctccgtacttgacaacgccagattcaatcatttcccgcaataaatcattcccttcacgggtacgctctccaacaccggcaaaaacagaataaccattgtgtccctttgcaatattatttatcaactccataatcagcacggtcttcccaactcctgccccaccaaataaaccaatttttccacctttcgaataaggagctaacaaatcaatcactttaataccagttaacaataactcttgagatgtagtcagatcttcaaaacgaggagcttcacgatgaatagataaggtatctgtataatccagtttgcctaatttatcaatagcatctccggttacattcaacaaacgaccttttatctgtttacctgtaggcattgtcaaagttctacccaaatcccaagccttcatgccccgatataaaccatctgttgtatccatagcaacacaccggacagtatcctctccaatatgttgttcaacttctattatcaatttctcaccattatctcgtattattttcaatgccgcataaataggaggtagattttcaccaccattttcaaaaataacgtccacaacaggccctattacctgtgtcacatatccaaaacgctcactcatagatatcatatttttttagaaattcatacatatacgaaccaacctatccataggtttcatgttcaaacaagtaaaaaatgaattatacccttttagtgcaaaaggaataacatacaaataccccacaatcaccacactactcaagaaatcactaaataattaatttacgcatcaatatatatatcccactatcataataggaagataaatgcctcaaatattgtgaagaatgaatacttaaatcaattttacaaggtagaactcttttgcccatctgcaaaatacgacatgccacatttccacttgcattattatcactaggaagatcaaactgactactgatagcaagagacatcacaaaatgctgagagtaataaattccaatttcagaagcacacacttcatccatatgctctactacatcatcatatacaacagtttctaaactttgattatctgctattaaatggcctttgatttgtcctagcggacaaatcaacaacaaaaaaatatataatagttgcgaccacataaactttactatataataacaaagataacaataatcttatcaactgtactacaaataatacaaaaataatgccagaaagttgtatctttgactccaaatttattgtgaagatacgttatgagatttgacgaattagacctagaaaatgaaatattagacggtattgatgctatgaactttcaagagatgacgccagtacaagagctaacgataccgattattttagaaggtaaagacatcattggctgtgcacaaaccggtacgggtaaaacagctgcctacaccctacctcttctcaatagacttgtccgcgaaggcaattctgacaatcgggttcgttctgtaattatggttcctacccgtgaactagcacaacaaattgatatgcaattagaaggcttttcctattttctaccaatatctactactgtcgtttatggtggcggagacggagccggctgggatcaacagaaaaaaggcttacttatgggttctgatgtagtcatcgccactccagggaggttactatcgcacattgccaatagcggtattgatctttcacacgttaaatactttattcttgatgaagcagatcgtatgctagacatgggtttttttgatgacatcatgcaaatcgtcaaacatttgccacaagaaaggcaaacaatcatgttttcagcaactttacctcccaaaatacgccagctagctaaacaaattcttcacaatccggcagaaataaatattgcgatatccaagcctaatgaagcaattgtgcaatcagcctatatatgctatgaaactcaaaaaatgccaatcatattggatttatttacaaataatccaaacaaaaagactatcatcttttcctcatccaaacaaaaagtaaaagacttagcatatgcattaaaacgccgcaaactgagtgtagcagccatgcattctgacttagaacaggaacagcgcgaagcagttatgcttgatttcaaaaacagtaaaatcaatatattagtagcaacagatattgtagccagaggtattgacattgatgacattgccttagtcgtaaattttgatgtaccccacgatcctgaagactatattcaccgtattggccgcactgcacgtgccaatgctgacggagttgctattacttttgtttctgaagcagaacaaggcaaatttcataaaattgaacaattcattgaaaaagatatctacaaaataccacttccaccagaattaggagaagttcctacatacaatccccaagcttttgaacgccgttcgcaccatcggaataaacacaacaaaaaacgttattttaaacccaaaagcaaaagtacaccacaaaacaataaaggaggcttataagcctccttatacattttaataatatagttaaaaaatcgaattaccgatatctgtggtaaaacgttctagcgtttcaacccctatcaaagaattaccatgtttatttaattcaggactccacacagcaattgataaattgtccggaatataagctgcaatacctcctcccactccactttttcctggtaaaccggcacgaaaagcaaaatcacccgattcatcataaaatccacatgtcaacattaatgctcctaaacgtttcgcctgactactagtcaaaactctttccccattcactggattcaagccgtgattacataaaaatagaaatgcacgagataagtcgacgcaattcatagaaatggcacattgattacaataaacatccaataaagcgtctacatcatgctcaatattaccaaaactcttcataaaataggccaatgccatatttctgtctgctgtagctctctctgaacgtgcgatatctttatcaaaatatatatcatcattcccacataaacctctcacaaactctaaaattgcatctttaggacgtggatacaaactcatcaagcgatctgtaaccaccaaagccccggcatttataaaaggatttctaggaattccctgttcattttccaactggaccaacgaattaaaaggatttccagaaggctctctacctacatatttccagattgcatcgcctaaatggcgagtcaccattgccatcgtgaagactttagaaatactctgaattgagaaacggacttcagcatctcccacttgataaaactgaccatccaaagttgttagagcaattccatattgctgaggattaacctttgccaaagccggaatataatcggccaccttcccttgtccccaaaaactctgcaactcgttgtgtatattttctattactactttataatccatcgcaatcctattaaaggtaagagacaaatatttatacaaaaaaagggactttatttctaaagtccctttcgtgatccagctgggattcgaacccaggaccccaacattaaaagtgttgtgctctaccggctgagctactgaatcgtaccgcaactctctcaattgcggatgcaaagataaagagaatattgttacttgcaaactttttgcctgtttttttcaattatttttatcaagaaaaatcaaggaatccacttgctccaatctgcttttcaatataggcatatctttttgacgaatagcaagcaacatttcacatgccatttcaaaatttctctccaacacctccggagatatttcctttacaattttcatcacatcattcatcgcaaggtagctaaattgtattcttaattgctcatccacagtcttttctataatctcagcattagcaatagcatcagctgctgcttctctataagcattaatcaatccagatacccctaatttaatccccccaaaatatcgaaccaccacaattaaaatatttgtcaaatcatttgattgaatctgacccaatataggtttccctgccgttgaagatggctcaccatcatcattagcccgaaaatgcgtcttggcggcaccaagccgccaagcgtagcaatgatgccgagcatcataatatttttcttttaaacgggatactatttcacggatttcatcttcagtcaccaccggataagccaaactaataaatcggctacctttctccttatatattccctccgaagaagctgctatagttttgtatacatctgtttccactatactaatttccgttgaatttcctctacttgcattttaaaattacgatcagtttccatcaagtctgtcacagctttacatgcatacaacaccgttgcatgatctttttttccaatttggcttccaataaaagcaagcgacttattcgtaaaattcttacataaaaacattgctaattgacgtgcttgaacaacttcacgtttacgtgtttttgtctgcaagagatctaatgaaatattataatggtcacatacaacttgctgtattttatcaatggtcagctcttcagtctgctttttaaccattttaccaagaatatccttagcgatatccaaagtcaaatcgcatttattaaaagttgattgtgccaataaagaaatcaacacaccttccagctctctgatgttattatcagcaaatttacagatataattaataatatcatctgatatatcaataccatccttaagagccttatttacaatgatttcctttcgtgtatcaaaatcaggagcctttatttctgccgacaatccccagcggaaacgtgaaagcaagcgctcttccataccttctaattctgcaggtgatttatcacatgtcaatatcaattgcttgccagattgatgcaaatggttgaatatatggaaaaaagtacgctgcgtaccttctttacctgccaattcctggatatcatccaaaatcaacacatcaatcaactggtagaaatgcaagaaattattcaattcatttctacgcacagcctccgtaaactgtgtttgaaacaaattcgttggcacatataataccactttattagggaaatttctttttgcctcccaacctatagcttgagccaaatgtgtttttcccaatccagatcctccataaagcaataaagggttaaaagccgttgcacccggacgttgcgcaatcgcatacccggcagattttgccaaacggttacaaggaccttcaatataactatccatagtataagatggattcaaattagaatctatctgcaaatgactaggagccgctgactgaaaaggatttttaagctctgtatcataaatcacatttgtggcaggcttattggatggagcagaaattatcgtgcgtgtcaaaggctttacccgcggtttttgctcttgcactacaattacagaatactctaatttagcctgaggccccaaaacagtacgcaaagcatttctcaaaatatcaatatactcaccttccagcttttcatatacataagcagttggcacttgaatagtcagtacatcatttttatatttcaatgcacgaaccggctcaaaaaatattttgaactgtccaggagcgaccttgtcttgtattaaagacaaacattcattccaaatctttacatactctctttccatagtctcctttattagtcagattcttttactattgaattctttccccaatctattcgcgtacaaaattcagaaaaaaataattcagaaaaaaatccgtttacgcttgtttatcttcaaaaaaggtttcctactatcaatcaacacattaaaaatatcaaactgaaaatcaacacattaaacatcaaccgcaaacatgtttttattgcaatacggcatctattaaatacagatttcattgtatagagacttcaccaaaacatctctaaaccattcaaagcaaaggtgtaggtaaaaattaaactttagtaaatgacacgggcagtcaatgcaattatgtaaaacaattgcattgaatctccattcctgtttagaatggttctaaaataatttttaatctactttaacaatatacgcatccttaaaaatcttgcctacattttccaaatccttctctgcatcctttaattcattataagtacgaatcaaataaaggtaagccccattacgacgaatttgtttcaaatcaggatacttaatatataaatcatcattcaacggcaatggcttagcactttctgctatcacaataccataatgatgtatttctagcggcttaccggctcccatgctaaacatagataaattgataaaacgcttcggattttgtctaaactccaccaacaatctattcaaattctcgctaagctgagtcatactggtataaagagcatcatcatacaccattccacctaatgtaccttgtccgcggttaacagccttcattatagaatcagcctgcgccaatacactattcaaagagcgaattgtatgattcaaattaacagctcgcaacgaatcactaatagatacaatattatccatacctttagcgatattatcattattgttcttcaaattccccgtaacactattaacatcctccaatatttgcgaaatacgttttgactctttagacagcaaagcatttaacgtaccggatgcttcctctacattatctaatgtccgactgacactttgtaacgatcctctgatatttccattagagccatcattaaagatttcctgcaaagcaatcaaaacagtatccaacgaaaccagcacattctcagctttctttttcaaaggctccaactgctcattcaattgctccatcaaccctagcgcaagttgacttcttaacgtatcaccactctctgcatatttcaaatcatcgccaggtattatattaatagctttcgatcccatcaaatctgcactttgaatagccgcaaccgaattgcaaggaatctgcaaatccttaccgactgtaaactgcaccaatactttatcataacgttcacctacaaattgaatagaattcacctgtccaacaccatatcctcgataaattacactactggataccttcaatccatccacccgatcgtatattccataaaagacattattattatcaaacaaagcttttgccttcaagaaattaattccccaaatcaaaataaccacagcagcaatagctgtcaatgccaattttacttcacgtctaatgtatatcatatcattatttttatttaccttccaacttccgagcctcagccacagaaataatttcgttattatatatagcaattacaaaacaatccttgacaaacttcttcacttcccccaaacttttctttacaacatctaaactttcagaagcctttacataataacggtaacgcccattagaatgcaattcactcacttttatatttttgcatatacttgcacaattctttatacgcccaacagaagaagccacttggattgcataaaaaggtcgctcagaagttcctttaccaacgcccgcttcagatgcaatagttttattattatcaactttaccattttgtattttccaagaacctacagttttggcctctaacttatttttataattctgaaatcccttaaaaattgagcgggcgatcttatcttgtcctgcattagacatcataaaacgctcgtcatcaggatttgtaatatatcctatttccactaaagcagcaggcatcgcaacatccttcaacacccacaaaggagcttgccgcacctcccgattcacctgctttgtcgttttcaccaactcactttgaatcatcgttgctaaattaacgctgttttccaaatgcaaattccgaatcatattaaataatatataagactctgcccgggacggatcaaatccggcatatttagcagaataatcatcctcataatgaatcacagaattctcctgcatcgccactttcaaattatgcgcagaactattagttcccaagacaaaggtttcaacacctttaatatacttattacttggtttcttttttacatccaaagcattagcatgaattgaaataaataaatccgccttatttttattagcaatacgtgtacgatcacgcaattctacaaacacatccttatttctaatatacaccaccttcatatctgggtaagctgtctctattaacttccctagtttcaatgccacagccaagacaacatttttttctttagccttcgagcccattgcaccagggtcttttccaccatgcccagcatcaatacaaacacacttgatcctgcctatatcagactgacctacggagatgtgcatggaaccaaaaaccaaaaacatcatcaagattcctgtaattccgtatctatttatcattacatttaaaactttatttcttacatttgcactccgaatccgagaaacgggatgcgtttatacatcacaaaaatagtataataaattgcaaattagaacatacataagccattttattacgttttctgtcattttagcaatggccgcttgttccgtggcatcccatgtcgtgcaaaatgaaacaggggttagcacaaatgatacgaagcagcaagactctattgcagaggtagctatcaaacacgtagacacagtctctcaaagcgttaagcagcaacaggacagcaccataaaaagacaagatgtcaagactatcactcaggacacaactttcattgctgattcctcacacattgttgcagatagcatccaccccagtataaacccacaagatacaacggcccaggactctgtgccagctccaatgtttaaagatattgtcagctacacagctgatgactccataaaactctccataccaaacaaagagatgtttttatataaaaatggatttatcaaatatctcacaacagaactaaaagctgactcaatatcactgaacatgggcacaaacgaagcttatgctagtggtgtctccgacacagccggtacattgcagggcaaacctgtattcaaggaaggtgctcaagaattcgaatgcttggacttaaaatacaatttcaagacaggtaaagcatatgtcaaagaaattatcacacaacaaggagaagggtatatacaaggtaaactgaccaaacgaatgtccgattctatctattgtgtaaaaaatggttggtacaccacctgcgaccagcacgaccatcctcacttttacattcgaatgagtaaagccaagcttatcaaagacaaaaaagtcgtatctggattcgccaatctatatatagaagatgtacctcttcctttagccattccattcggctttttcccaatcaccaaaaaaggaacctccggtatcttgatgcctacttacggagaagagcgtatgcgtggcttcaacttacgggacggaggttattattggtatataagcgactacattgatatggcgctgacaggaacgatttacaccaatggatcatgggcagcaaacttaggctccacctatcgcaagcggtacaaattcagcggtaatttcaattttagcatgagccgcaaccacacaagtgaaaaaggcacaccagattacacgcaatccaaagactggtctgtacgatggactcatacccaggatcctaaagccaatccttacaccacattctctgcttcagtggatatgtcgtctgccagcaacaactactacaatagcggcacgaacattgatgacattgccaatcaacgtaagcagtccagtatttcatggagtaaaaaatggccggatcgtccattcagccttacagccagcttcaaccataaccaaaacagccgagacactaccatctcattatcattcccgaacttaaactttcgggtatcacaaatttatcctctacgccgcaaagaacgggtaggaaaaatgaaatggtatgaaaacattggcttcacctatagtgctgaaatgaaaaactctattcagacaaaagaatccatgttgggagaatcattcaaacaccttgcacgagattgggataatggtttccagcactccattccattgagcaccagcatcaacatagtcaaagacttatccatttcaccttcaataaactacaaaggtgttgcctacctcaaatctattcgaaaaggaaattgggtaacagactcaaccatggccaactatggctatattccgatggatacgatttatggtcttcattatgcacacaattatacgacgagcatatcgatgtcctataatccgacaatctacggtatgtaccaattcaagccagacaaaaaagtacatgcaatccgccatgtattaagcccaagtgcaagcatatcctactctcccaattggggagtcgaccctgataaatactggaaaacatacttagacagaaatggtcaggaacaaagatactccatttttgaaggtcaagtatacggcacacccaccagttccgaacgttctcaacagagcgcaaccttaaatttgagcattgacaataatgtagaaatgaaagtgcgtaatgacgatgactcaaccggtaaagaagaattcaaaaaagtcaagatattagaaagtttccgtattgccagcagttataatttctttgccgactccatgcgttggagcaatatctcattgactgcacgtacaaaaattttcaacaacaaagtaaatatcaacctcaccggaacccttgatccgtatgccatcaatgccaacgcacaacgtatcaacaaatattccggaggtattggacgtttaacacgtgtaacagcatctacaggtatccagttttcttctgacaatggtaaaaagaaagaagaaaaagaccctattctaggaggacgatacgatgaatacatggactttgaagttccttggagtatcagtctggattattcattcaactattctaaaaattattctcctaacagagctgaaggagcaacgaaaccgttgagcaaaaataccatatcacaaattatcagtgccaacgggaatttctcattgacccccaagtggaaattctcattccgaaccggctttgacttccagcaaaaagagattactgcgactagctttaatatcacccgagacttacattgttgggaaatgaccttttcatgtataccatttggtacccaccagtcatataactttcaaatcaatgtacgttccagcatgttgcgcgacttaaagctgacaaaaaaggactcttggtacgacaggactcgataaatcaaaaccaaactaacataaacatgaaaaatattctttttactgttatcgcaatcgttatagcttgcggaacaacccaagctcaatttgaaaaatactttcatgagcgcaccatgcgttttgactattatcattgcggagattaccaaaccgaagaatatttcttcgatgaactgaaagcagaaccctattggggaggttctaaagtgacattgttagataacaccggctacggaatgcaaatgtttaaaatcatagacaaagccagcggtaaagagatttactcacgtagcttcaacaccctgttcaacgaatggcaagcaaccgatgaagccaaacacatccgcaaagctatgccggaatcagtcatatttccctatcctaaaaatcctgtacgaatagaaatatattctcgcaataaaaaaggagtattcgaaaaaaaattcacacaggatatcaacccagagtcctattttatccgtccttttaccccacaatatgaaacatttgaagttgcctaccatggtcaaccatccaagcgtatagatttggtactcgtaccagaaggatatgcagccaacgaaaaagaaaaatttgttgaagcatgtcagaattttgtaaaagaattcttcagctactctccctacaaagaacaggcaaacaattttaatgtccgtgccgtatgggcaccatctaaagattcgggcgtatcccttccgggcgaacgcgtatggaaaaacacggtcgcaaatgccagtttctacaccttcgactccgagcgctaccaaatgattgaaaactttcagggtcttcgagacattgcggcacatgttccctacgaatatatctatgtgctttccaacacacaaaaatacggaggcggcggtatctacaacttctacggtatcagtgctgctcaccatccgacgagcaccgggaaaatatatgtacacgaattcggtcatgtactgatgggattaggcgatgaatatgtaggcacggtatcctacagcgaaatgtatcccaaaaatatcgaaccttgggaagagaacttgaccacattaaaggattttgataaaaaggactggaaaaaactgataaaacccaccacccccatccctactcctcagactgaagaatacaaaaatgaagtaggaatattcgaaggcggaggatatgccagcaaaggcatctaccgaccgttccaaacttgcctgatgaaggaattctccaccgacaagttttgcccggtatgcacacaagccatcatcaaacacatccaatggctatgtcgctaaataaaacgattaatataatttaatccattcatagctattccctgagctatccataaagcggataaaatcttccgttttgatagccagggaagctcggttatcattcggatgaaaagacaatttagaagctttctttagattttcatccaaaaaaacatagacatggtgttccacatcattcaccaatccaaaaggacttactgaccccggtttcaatcccaaatacttctccattcttttttccgaagcgaaactcaattttccctggtgcaacaaatgctccaaatcatgaatagccaacgtctggtcacaatggaaaatcaccagatagtgctggttgcccttatggttgcgaaaaaataaattcttacaatgcgtactatccagattcacccaatactgtcgcgcgatttcaattgttggagcttccggatgttccagataatcaaattcaatccccagctcagccaatctttcatataccttttcctgtcctatcatatcaattatataaataaattctcaaaacctcttttcttcccttgccagctatctcgttcttgtaaacgcttatccagcttagcaacaaattcaaaattcttaacaccccatcttggagcaatcagatactcctccggagcctgattaacaaaacgctccaaataaacctccggccgaatatattcaataacatccaccacaaaatccaaatactcctctaaagaatacaaccggaatgccgcaggatttttcaaatactcatctgccatacgagtatcacgaataatttgcaattgatgcaacttcaatacattgattggtaaatcacacaaacgcaccgctcctgccagcatcgactctctactctctcccggcaacccaaatatcaaatgagcaccaatagtaattcctcgctcagcagtcatataaatagctctttcagcctcagcaaaagaatgtcctcgattaatggttttcaaaacctcctcattcaccgactccactccatactccacacaaacataataccttttagccaaatcagcaatataatcaagcacctcttcactgacagcatccggacgggtaccgattaccaaccctacaacatccggacaagccaaagcctcctcatacctatttttcaacacctcaagcggagcataagtattcgaataagcttggaaatatgccaaatatttctgacctgcatacttatgagcaaaaaaagcttttccctcttccacttgcgaagtgatagaagctgtagcccggcaataccctggactaaaactacgattattacaaaagctacatccacccactcctttcactccgtctcgattcggacaggtaaaaccaccgtcaatagacaatttctgcacccgttcgtgaaacagcgtcttaaaaaaagacgggaaatcattatatcgtttcttcataccattaaaattctctgcaaaaatacgcattctctaaaaaacagaaaaaccatttttgtatataaaaaaaatatcttaatttcgcagtttgaaataagtggttatatataacacattcttaattgagattcaatactttgagaaaataacaactttataataacaaccgcctcctttcgggaggcaaaataacaaaaaacacaatatgaacactaagtacgtttacacatttggagacggaaaagctgaaggaaaagcagacatgaaaaatctgctgggtggtaaaggtgccaaccttgcagaaatgaacctcatcgggctgccagtacctgcaggtttcaccatcacaacagaagtttgtactctctacaatcaacaaggaaaagatgcagtagtaaaattgattgaagatcaagtaaaagccggaatcgcacacatggaaaaaatcatgaatgcaaaattcggctcaaaaggtgaagcattcccgttgatggtatccgtacgttccggagcacgtgtatctatgccgggtatgatggacaccgtactgaaccttggtttgaacgatgacgcagtacagttattggcagagaaatcaggcaatgcacgttttgcatgggactcttaccgtcgttttatccagatgtatggtgacgttgtaatgggcgttgctgctgcaaaaggcgaacacaatcctttcgaagtagaaatcgacaagctgaaagaagctaaaaatatcaaaaacgatactgattttacagttgaagacctccaggttttggtagaaaacttcaagactgttgtaaaaagccgtaccggtaaagacttcccgacctgtccatgggaacagctttggggagcaatctgtgctgtattcgattcttggatgacagaacgtgcagtactttaccgtcagctgaaccagattcctgaagaatggggaactgcagttaatgtacagtcaatggtatacggaaacatgggtaacaactcagctaccggtgtagctttcacccgtgatgcagcaaccggagaagacattttcaacggagaatacctgatcaacgcacaaggcgaagacgtagttgccggaatccgtactccacaggaaatcaccatcgaaggatctcgtcgttgggcaaaacaacaaggaatttcagaagaagagcgtgcatctaaatatccttcattagaagaagcaatgccatctgcatacgcagacttggatgctgtacagaacaaactggaagaacacttccacgatatgcaggatatggagttcaccattcaggatggtaaactttggatgttgcagactcgtaacggtaaacgtaccggagctgccatggtaaaaatggctgttgacatgttgaaacaaggcatgattgacgaaaaaacagcattattacgtcaggaaccggctaaattggacgaacttcttcacccggtattcaacaaagaagctcttaaaaaagctcacactatcaccaaaggtctgccagcatctccgggcgcagcatgcggtcgtgtagtattcttcgcagacgaagctgaagagtggaaaaacagaggcgaaaaagtagtacttgtacgtttggaaacttcaccagaagacctgcgtggaatgaacgtttcagaaggtatccttacagcccgtggaggtatgacctcacacgcagccgtagttgctcgtggtatgggtaaatgctgtgtatctggagcaggagacatcgtagtagactacgcaaaacgcaacttcagcgtaaacggcaaccttatcaatgaaggagactggatttcattgaatggttcaaccggagaagtttatctgggtaaagtagagacagaagatgctaccctgaacagcgacttcacagccatcatgaacttggcagaaaaatacacccgcatgtacgtacgtaccaatgcagataccccgaaagatgctcgtaaagcacgtgaattcggagctaagggagtaggactttgccgtacagagcatatgttcttcgaaggtcaccgtattgatgcaatgcgcgaaatgattctttctgaaacagtagaaggccgtcgtgcagcattgaacaagattcttccgatgcagagagaagacttcgaaggaatccttgaagcaatgaacggtctcggcgtaaccatccgcctgcttgacccacctttgcatgagttcactccgaacgaaccggcatcacaacaatatatggcacagaaactaggtatgccagtagctcgcatcaaagagaaagtagattcactgcatgaattcaacccgatgttaggacaccgtggttgccgtctgggtatcacttatcctgaaatcacagaaatgcaggcacgtgctatcatcgaagctgcttgcaacttgaaactgcgtggcttagatcctcgtccggaaatcatggttccgcttgtaggtacagtaaaagagttgaaacagcagtcagaaatcatccgtcgcgttgcagcacaggtatttgaagaaaaaggcgtgaaagtagatttcatggtaggaaccatgattgaaatcccgcgtgcagctatcactgcagaccagattgcagaagttgcagaattcttctcattcggtaccaacgacttgactcagatgacattcggatactctcgtgacgatgctggtaaattcttgccggaatacatccgtaaaggtatcttgaaaacagatccatttgcagttctcgatcaggaaggtgtaggtcgtctggttagaatgggtgtagagttaggtcgcaagacaaactcaagcttgaaagtaggtatttgtggtgagcacggaggtgaaccttcatcagtaatcttctgtgacttagtaggcatgaactacgtaagctgttctccgttccgtgtgcctatcgcacgcgtagctgcggcgcaggctgctatcatgcacaagcaataaatgccagataactaaacttttaggcggtaagcttttctaaactaaaggcttaccgcctattgttttttaagaggttcgttcattctgcacgctttactatatcggttccggtcccatctcaaattccacggtcacaccctccatgatttgctcgtgggtcaaataacttttatcgtaaggttttccatttacccgtaccaactgaatataaacattctgtggacttaccttcggagctagcactgtaaaagtctttccgttggaaagatgcattcgcatttcaggaaaaagcggagtaccgatttcataccgcccgccgacaggattcatcggatagaatcccatagcactgaatacataccaagcggacatttgcccgcaatcctcattaccgcacaatccgtccggagcattcatataaaggttgtgcatcacttgagctacatatttctgagtcttccaggtctgcccagtccggttatacagataaataacatggtggcacggttcgtttccatgaacatattgccctatcatacccgtactgaatatcggcagctccttctgattcgaagggacatacgcaaacattcggtccaatttttcttcaaaacgctcttttcctcccatcaatgccatcaaaccttctatatcatgctgcacggaccataagtaatgccacccattgctctcacagatatggggagtatattcatcgggagaataatccggctgaaatacacccttgtcatcccgaggctgcataaaacccgttgccggattaaacacattccggtaattctgcgaacgcatataaaactcttcagccaactgtttcttgcccagtttctctgccaacatagctatgcaataatcatcaaaggcatattccaaggtcttggatagcgaccaatcctctgcattccattcatctttcagattataaggaacatatcccaatttcttgtattgtccgataccccggtaatcatccagatttgccgttaccacacaagcctccaaagccttcacggcatcaaaatcaccgattcccttcaggcaggcatccacgatgacaggcactgcatgataccccatcatcatatccgtttcactcccccataaattccacaccggcaagcggccgttctgttcataaaaagccaacagcgacttcaccatgtcattcgtgcggtgaggctgtgtataagtcaataacggatatgctgcacggtatgtatcccacaacgagaaagtacaatagttcacccacccatctgcatggtgaacctgcctatccggtccataataagccccatccacatcgcagtatatcgtcggagccagcatcgtatgatacagagctgtataaaaattcaccagttcatcctgattacagcctttaacctctagttttcccaattcatgattccagctctctcgggcctcctctctataacagtcaaaatcattatgcggagcctcggcaaccaaattcttggcagccccctccatactgacaccggagagcgccgtccgcaccaccaatgtttttccaacaagcgactcaaaatcaaagcggactatcatcgtaactgaatccaacaccatgttatcaaatggcttcgaaaaaacagaacggaaaaacacacgctgcccccttgcccatccatcagaaaaacgataaccctgcaccgtacatgaatccaccacttccacataagcatccgtagtacgatcccaattcatcgctttccccaaattcaggaacaccacagcctcagcctgtgggaatgtatatcgctggataccacaccgctccgtcgctgtcaattcaacatcgatatcataatccgccagtctcacccgataataaccggcagaggcaacctcatcaccatgcgaaaacttcgagtaaatccccaaagccccctcagcctccacataaggcagcgtcacaggcataaaagaaatgtcataaagatcaccggcaccagtccccgacaaatgagtatggctgaatccagcaatcgtactatccggatagaaatacccggcaatacgatcccaccccgacagaccattgtcaggactcaactgcaccatcccaaaaggaacctgaactccaggataggtattcccggtaaaatctgtgccgataaacgggttcacccattgtgtataatcgattggcggcaaagaagtcttacaagaaacacacactccccaaatcacccccacaatatacaatacaagtctcatcatgcatcatcccggcaatcaatacaaaactcctcatcctcttcatcagggataaactcacagccacagccggcacagatgcgtacctcaacatcctcattttcgttcagactttcagaatccacatcataatcatcattccaactcattgcaggatctattaaaaaaaattactctcttacaaaatgcggataagccatctcgcccaaatccgcccgatattcaaaaccttcgtaactgaaagcatgcaatccttctattccggaaatacgattttccaatatataacgcaccatcgctccccggcatgactttgcccataccgcctgaatcttcaacttccctttaccgtcacgcacataaaacagcggatgcaccacagtcacctcccgacatacccgttgccaatcaaacaaatgttcatactcctccgttgaaagatgcaccaacacgccgtcatcatttttcacactctcaatcaacacatctgtcaatttatccctccagaattgataaaccgcacccgccaacggcaatttcaccgtatgttccatccgataaggcaccacagcatccagcggtcggagcaagccatacaaaaaacaagtaatccacagatgcctctgtgcaaaatcaatagtctctgcactcaaattatttgccttcaaatgcttatatgcctgtccattaaatgccatgatagcaggcatactttcagtacagaaaaaatcctgataccgcttccagttctcaaccgccaatttccggctacacccgagctgctccgccaattcctccacattcaacgccgccatctccatagccaactcattagcctctcgctgaaacgtcggcacggaagccggctttacatccgacttctcaaacattatcttggcatttgccagtagtatctgcatatccttcaatcctgtataatcatcaatattacacacaaagataaaatactctttgagaactttagtgaatctctgtaactgattttagtcatcaatccacgtattccgacaaaccaattgattcatctacggcattcccacccttcaaccgtccccgtcttggaagaaaaattcaccccgaccttaaacaactggcgagcatcggattcatacggacgggcataacctttctcctctatctgtcgcaatgcatcggctgccgtgccatccaacttaaattcgaagatatacacgtattgaggcgtttcaacaatacagtccacccgaccttcgctctgctccttttccaccaaaaccgtataaacactcatcagacgaagcaacaaataaaacgtatagtggaaataacgctcccgttccggctcgttgtccttgcgccgcatgctatagggaatacctgccaggaaagaggtcagcattttgcgaaattcttccaattgcccccgctttaacgcaaataccgctttcaccatccaagactccaaaggcatacgacattgcagatagttcgtcgccaccattgccagaaaaccgctcttcacctcgttgttaggaaaatcaagcagaaaaaggttcgaatccttgtcgtaatccttaatcgtcagataaccactctgataaatcatcggcaatggatactctacatcagccttgtaattgataaactcgtccggaagataatacttattggtcagatcatcaatcccctcatggaaatgattcatcaaccgaatcaaataagatggcgtaccgctggtgaaccaataatcacgaatatccttgctatcgaaagcattcagcagactgaacggattataaatatctgccatattcttgctaaagtgataaccgtcgtaatgccgcttcaaacgcctacggatttcctcttcgctacaaccgtccgactctgccatctcacggataggttcagcaaactgtgtatacagttcctcttccgtaatgccacaaagagcctcatatttatcaaacatactgatatccttgggttggttgaaaccactgaacacactgacctgcgagaatttggtaacacccgtcagaaaaacaaagcgcaaagatgcatcggcttgcttaaacacggaataaaaagccttcaatatatcacgattccggtccaacaattcaggatccctctccaatacatccaacaaaggcttgtcatactcatccaccagaaccactgcaccccggcccgtctgctctgccgcagcctgcaagatacggtaaaaacgcaaaccatattcttgggggacatccgttacaattccgtattcccgctcccactcggaaagcatactatccaatacccggtttaaagcaccggattcagtgaaattgattccgttaaaatcaaaatgaaacacccgatgcacatgccagtcctgctccaacgcatcgattttcaagccggcaaacagttccttctttccctcgaaataggcacgaagagtggaaagcaacagacttttcccgaaacgccggggacggctcagaaaataaatttttccttctgttgccaaagaatagaccatatcggtcttatccacataaacaaaaccacgttctattatctgatcgaaagtctgtataccaaccggatatttcataatacatgcatcttaaatgtaaaatatagaatacatacaaaattagataatttatttggcatttcctactctcatttctgccaagatatgatatatcctccttacctccattccctccttcctctcacactcgtccgaagctcacccgaagctgcgccgtcgctcactgcttgccgttcggaggagcttcggaggaacttcgggggaggaacggagaaaggtgagacataagtgagagatgagtgagacccccgcaagaggtgtatcggacagggaaaacggaaccgggaaaaattcaaagcgacaaacccaaacagacaagggagacgcaaaagagaggcaagcaaagctgcaataccttttttattctcaccaaaaaatctatatttgccagactaatttaaaactacaaatcgatgaatgtgagaaatcttacgcaggaggaaattacgtcgctctcctgtcaaggctgtactgcctccgactggcaacggattcttgttgctcctgactttaaaactgactttatccaccatacccgattttccggagatgtctgtctgggcgtgtttgaacatgaattcattctcgacggaggtgttcccaaacattcgggactgaactatgtgaccctgcacaactgccgggtgggcaataatacgctaattgaaaacatccctaactatattgccaattacaatatcggagaagaatgctttatccaaaatgccaacttgattgtgacggagggctacagctcgttcggcaacggcacacaggtggccgtacttaatgaaaccggaggacgcgaagtgccgattttcaatgaactgtcggctcatctggcatatatcattgccctttaccgccactatcccccgctgacagaaaagctaaagagcatcattgcccgctatacggaacaagtgtcttcagaccggggaaccatcggcaatcgggtgcgcattatcaataccggcaccatccgaaatgtagccatcggcgatgacgctaccatagacggagcatcgcgcctgaaaaacggctcaatcaatagcaacaaatcggcacctgtaaaaatcgggcacaatgtagtggccgaagatttcatcatctcgtcgggagccagtgtaactgacggagctgcactgatccgctgttttgtaggacaggcatgccatttgggacatctgttttctgctcacgactctctatttttcagcaactgtcaaggcgaaaacggtgaagcttgcgctgtatttgccggaccgtatactgtgaccatgcataaatccagtctgctgattgccggtatgttttcttttctgaatgccggcagtggttcgaaccaaagcaaccacctctacaaactgggaccgattcaccagggtatcgtggaacggggttcaaagactaccagtgattcctatatattatggccggcaaaaatcggcgctttctcgctgattatgggacgacacgtaagccacccggatacttcagatttgcctttttcatatctgatagagcagaacaaccagacatacctggttccggccgtgaatctgcgcagtgtgggtaccatccgcgatgcccagaagtggcccaaacgagacaagcgcaccgattcccatcggctggattgtattaatttcaacctactgagtccttatacaattcaaaaaatgctccgaggtacagaagtattgcgcaccctgcaagaaatttcgggcgaaacatcggaggaatactcctaccaaagtgcacatatcaaaagcggagctttgaaaaaaggaatccaatattatgcaatggccatcaacaaattcctcggcaattccatcatcaagcgattggagaacatccctttccacagcaatgaggaaatctgcgcacgcctacagcctgatactgagaaaggaaacggcgaatgggtggatctttgcggcctgatagccccacaaaaggagatttttgaccttatccggaaaattgtcgaaggggaaatctctaccatcgaacatatcgagaaggtattccggcaactgcactccgactactaccaactggaatggacctgggcctgggaggtgatgcagcaatggtatcatatccgtccggagagcattactgcccaagatgttatccgcatagtaaacacgtggaaagatgcggtggtgacactcgaccaaatgctctacgaagatgccaagaaagagttctccatgactgcgcagaccggttttggtgtggacggcaacaaaaaacaaaaggtaatcgattttgaacaggtacggggtgcttttgaaaacaatccgtttgtagaaaccgtcaagcagcatatcgatatcaaaaccgctctcggcgatgaactgatagcccggttaagccacgtggcaggacaatgattcaagcgacaagcatatcacaacctctgctcaacatgggcagaggtttattttatctatccaggcaataatgcgaacctactctttgagcatattcagaagtgtcaccaacgaagagactgtccgtatggcctgcttgcctaccggcgatgtcttcccttgaaaagcagaaaggtcggaaccgacaagcgaatgcaccatctttttcatcagtgccctggaaatcaaattttgcgaaccggccaatgtcccccgagtgaacccttcgtagtaatccttgtttttcattttgaccttcaaatcagaagaattactcgccaataccgccaaataataaatattggtcggattggacaaatccaaagtaccgtcttttctatattggcgatgcaaagatttgattgctttaccacaagccgaatcggcagcgtaagcacttgtatgattagacacgcccctagatggctgatttatagacacacatgatatcatagaaaacattaccatacacaagacaaaaaatcccatccttttcatattgatttattttaataacacttgacaaatctacaaattttattgcaaccaccgaccgattgtctagctcattttacccggagataaaaaaaagattgtatctttgcataaaatcaaaattaaagatagtcatgtcagaatgtatggaacatccggaaaattcgccggaatatgaaggattaaaggtaaacaagggcattccccagccggaacccatgaatcccaatattgccgcacgcctgaaaatgattcgaaagcaggagctgaccgccgacgattatgtggagggcatattaaaaggcaacatcaatattttaagtcaggctattaccctggtggagagctccaagcccgaacatcaggctatggcacaggaggtcatcagacgctgtctgccctcatcgggacggtcggtacgtatcggtatcacgggtgtacccggtgccgggaaaagtactttcatcgaaagtttcggcaaatacctgaccaaagagggacacaaaattgccgtcttggcgattgaccccagtagcgaacgctccaagggcagtatcctaggcgacaagacccgtatggaagaattatcgtgcgacccgttggcctatattcgtccttccccctctgccggttcgctgggcggcgttgcccgcaagacccgcgaagccatgattttgtgcgagacagccggatttgatatcatcctgattgaaacagtcggagttggacaaagcgaaacggcagtccactcaatggtggatttcttcctgttggtacagatagccggagccggcgacgagctgcagggaatcaagcgcggtatcatggagatggccgacagcatcatcatcaacaaagccgacggcaataacatccaacgtgcggaattggccaaagcccaactgacaacggctttgcattatttccctcctcacgaatccggagtgatgccaaaagtgatgacctgttccgcttacgagcgcacaggtatagacgccatttgggacaatatcctgcactattgcagcgaaacacaacagaacggctattttgaacagcgcagatccgaacagtcgaaatactggatgtatgaaaccatcaacgaacagttacgcaaccgcttctatcaaagccagaaagagaacctgaaaatcgccgaagaacaggtgatgaagaatcaggtcagttcgtttgccgctgctttcgaattgctggacaaatacttcaaaggataagtatatctcaagaaaccaaaagcaggattcccaatcgggtctcctgctttttattcatttaaaatccgggaaatcattcaaaaagacaaccccccgcttagtatcgatttttccgcaaaagtgcgtcaccccgtttgtaacggctacataaggagccgaaagcgtgatattatagcggaaagcctggtcgaacacctgacgcctgagaggcacagaaggagctttacactctaccaacagccaaggtgttcccgagcggtcgaaaacaaccacatcaaaacgacgtggcaaaccgtaaagctcaatttcccgctcaacggctatcaaggccggcggacatccctttacatctatcagataatgcactaaatgctgacgcacccattcttcgggtgtcaacacaacaaacttcttgcgaagtatgtcaaaaatcaaaacattccctccctgcttcttcactttatattcaaatggaggaagcgacaactccatcatccggctatatttttaactttcaacaaactgctgtctccataactcagaaagcggaatccatgccccaaggcatagtcatatattttatgccaatcctcaccgacagccgcaccgacaagcaacaacaacgtactctgcggctgatggaaattggtaaacatcgcatcaatcacccggaaacggtagcccggcacaataataatggtggtagcagctttcaataactcttcatgtgtttcgtcgaaccaacccaaaagagcctccatcgattcacgcaatgaatagtgcgacggcaaagtataggcttcccactgctgcaaggagaaaaaatcatcataaccggcaagccgtttaacacccagccaatagaggctttcaagcgtacgcaccgaagtggtgccgacggctataatctcttttgccttatcacgcagacattccaccaaaccacgagtgatgatgacatgctctgtatgcatatcgtgtccaccgatcgtttccgcctttaccggccggaaagtaccggcaccgacatgcagagtcagctcttggatattcactcctccggcacgcagatcgtcaagcaaaggacgggtaaaatgcaaaccggcagtaggtgcggccacagatccttcttcacgggaatatactgtctgataacggatttcatcagaagcctctgactctcggttcaagtagggtggaatcggaatacgtccacacccttcaagcacttcgctgaaagacaattccccagtccaccgaaaacgaacaatcacttctccattcagctgctcgccccgctctgcctgcaaggtatatgctgcaccttcatattcaaagcaacattcaaccgttccttctttccactttttcagattgccgaccatacagctccactcacaacaacccttggcagcaaaattctgcgcataatccacaggctgatgcggctccagacaaaacacctcgatggtagccccggttggttttctgaaaaagatacgggcatgaatcaccttggtattattaaaaatcaatgtctgcccgggccggagcaattcccgagcctcaccgaaacgccgttcgtcaatctgcccgtcacgatagacaagcaatttggaatcttcacgctctgccagcgggaatttagcgatccgcgagtcgggcaaatcataggtataatcttctatccgaatgtttttcaagagattcagttcttctgccgttttcattttgccgtttaatgattatgttttaattttattgccgaaaaagcgtacaaagatagcgaaacgtaagcggtgcagcaaatgaaaacgaagattttagaccgaaagcatccgaacttccgccatcaacacacgcagagtgtaaatcagtctgtcatccggcagacccagcaaaaggagaagcatgaaaacaaaaaaagagattgtagacaattggctgccaagatataccgggcgcgccctggaagatttttccaaatacatcctgctgacaaatttcgaatattatctggaactattttctgaaatgtaccatgttcccatcatcggagcagacaaaacgatgcccaatgtttcatacaatagggtaacacttatcaatttcggtatgggcagccccaatgccgccaccattctcgacctattgactgccatcgaaccggaagcagtgctgtttatcggcaaatgcggcggcttgaaagacaaaaacgttgtgggagactatattctaccaatagctgccatcaaaggcgaaggaacttcagacgactacatgccacacgaagtgcctgcactaccggctttcagtatccagaaagcctgttccaaagccattgtcgcacacgcccggaaatattacaccggagtggtttataccaccaaccgccgagtgtgggaatacgacgaccgctttaaagagtatctccgtagcacccgtgccatggctgtcgatatggaaaccgccacaatttttacagtgggattcgccaaccgcattccgacgggggcgttactgctggtgtccgaccgtccaatgatatcggaaggcataaaaacagcagaatccgacaaacatgtgacacaggaattcgtaaaacaacatctggaaatcggcatagaggtattgaacaatatccacgacaaaaattattcagtcaaacacctgctattttaatatgaagagaatcgtatttatctgtttttgcctgctgctggcctattcgtgcaaagaaaagggccaaacggcacaaggtgcagaaacaagtattgaatggacccgcaagacatggaatttcggaaaagtgaaagagggcgaagaagtttgccataccttttattttaaaaacaccggaagcaacaacctgctgataaaaaacgtaaagacagactgcggctgcactacggtgaactatgacaaagcaccaatcagccccggaaaagagggaaaaattgaaattgccttcaactctcgtggcagaaatggaaaacaatacaaagaaatcagtatatttgcaaacattccggaaaagcagacaaccataagcattaccgcggatattacacattgaaaatattaaatatcaattaaataacaaataaagtatgaacacattatttattgcattacagcaagcacctgcaggaggaggattcatgcagtttttacctttgattctgattattatcgtattctggtttttcatgatccgtccgcagatgaaaagacaaaaagaactgaagaatttccgcgactcactgaaaaaaggcgataagattgtcacaaccggcggtatctatggaaaagtgctggaaatcggtgattattacattatcatggaagtagaaggacagaaccgtctgaaaattgacaaatcagcagttatcaaagatatgactgatgcaactccggcgaaataatccggaaaaacatgcaacaaaaggtataagccagattcatcgggcttataccttttaattttcaaacgttaacccctttagaacattctgtcttatgtcggatttgaaaacattgattgggaaaataaataaatatacgaaagagataagcctcaaccgcaatattgtcacttatctgatttgtgtcgttatcgcttccattctttggtttatgaacactttcagccaagattatctgacggaactgagctaccccatcaaatacatcaatatccctgaggacaaatattcggtggacaaattgcccgaccatctgcaattggatgtccaagccaagggctttacgcttatgggttaccgaatcaagacctcatttcagcctatcacattcaattttgccacctatgagcatttgctacaggaacgggacggcatttccgagtatatcctgaacaccaacgatatcaaggaaaaactcggtagtcaaatcaatccggacatcaaattggtgtccatctatccggagaaaatcgcattccggtttgctcccgcacaaaagaaaaaagtacctatcagtcctattttggactataaattaaagagacaatacattttaaaccaaataaaactcgatccggacagtgtaacggtcagcggaccggcaaatattatagacaaactgccaaacgtgccgacagagatgtggacagtgaaggatttaagccggacgaccagcaaaacgctcaaattggcagacgttgaatattgccacttgaatctgaattccaccaaagtcaccttggaggtggagcaatttacagaatcgcgccgcacaatagctatcacaccacaattggtgccggattctatcaatatgcgtttatttccctccaccttaaatatttcgtatgacgtaggtttgagcaaatatgaccaggtgagcgacaacgactttctttttgctgtcgactatccgcaaaatgcagatacagcctatctggaagtaaaggtggtcaaagcccctgctttcatcaaagacctaaagtttactccacagaaagttgaatttttattgggaaaaaaataatatggaaacaataggactaacaggaggaatcggttcggggaaaagtacagtagcccgaattttcaaacatatgggtttccctgtatacattgcagatacggaagcttcacatttgatgaattcctctccagacatccgcagggaaatcaccggacgattcggagaaacgatatacagcaacaaccaactcaataaagccgagttagccaaaatcatattcgaagacaaagaggctctgcgagacatcaaccacattgtccatccccgtgtcatggaagatttcaagtcatggagccaaaggcagaaaagtcctatcgtgctgtttgaatcagccatcctatacgaagccggtttaaacgattttttcggacatatcatttgtgttacagctccggaggaagtacgtatacagcgtgttatcagccgcgaccatacaacagcggaaaaagtgcgcgaccgtatgaacaatcaaatgagcgaaaaagagaaaatcagccgggctgatttcattgtaaacaacgacgggatgcaggcactattgccacaagtaataaaaatcatccaacaattaaacagtaaaaacaaataaattatggcaaaatacggaaaatggatcggtgccggactgggattcgctatgggaggccctctgggagctctgctaggaatctttatcggctccatatttgacaacacccaaagaatcaacattgacccgacccaaggcagcgagccgcgccctggcagcggacgaggagatttcatgtttagcctgcttgtattggcaacagccatgatgaaagcagacggccggattatgcgctcggaattggattttgtgaaagaattcttcaaacgcaatttcggcattgaagcaacacgcgaagcgatggccatgattaaagaactgagcgaaaaagagataccggtgatggaggtgtgtcaacaaatccggtacaacatggatcctgccgcccgcacgcaactgctctattttctgttcggcatagccaaagccgatggcactgtaagtgaagacgaaattcgtctagtggaaaacatctccaatgcactaggcatcgatcatagtacatttgtatccatcaaatcaatgtattatgatgatttaaactcagcctaccaagttttgggcattgacagcacagccagcaatgaagagataaaaaaagcctatcggaaaatggctatggaaaaccatcctgacaaagtgggccacttgggcgaagacattcgcaaagctgcagaagagaagtttacacaaatcaatattgcgtacgagaaaatcaaaaagcaacgtaatatgaattgaattaattttaatttacaatacacaattttctattctcgattaattactgtagttttgccaatcattttttgtaaaacgttaaacagcgaattatgttgaaagaaattttatctatctcgggaaaacccggtttgcaaaaactagtcagcaattcatccaacgcactgatagtggaatccctgattgacgggaaacgctttccggcatactcaaatgccaaaattattgccttggaagatatctccatatataccgaaaccgaagatatgcctttaaaggatgttttcaaacgtatgtacgataaagaagaggggaaacaggctctaagccacaaagaatccaatgacaaaatagtatcctatttcagcgaaatcgttccggaatatgacaaagaccgggtatatacttcagatatgaaaaaaatcatccagtggtataatctgctgatagcaaaaaatattctgaactttgacgaagagaaataattaaaaaagatttggagattatgctccaaatctttctctttttattacccctaactgacgctatgtttcaattcaaagaatttaccattcaccaagaccggactgccatgaaagtgggaacagacggagtgctcttgggtgcttgggcagatttggaacaagcccgtcgtatcctggatatcggcacaggcacaggactaatagccctgatggcagcacaacggaacaaccatgcatatatcgatgctattgaaatagaagaacatgcattcaaacaagctcaagaaaatattgcagcctcgccttggaaggatagaattcacatagaacatacacctctacaatactattcgcccaatacacgatatgattgtattgtatgcaatcctccctttttcatcaattccacaaaaaacccaagcgattcccgcactctggcacgacataacgatattttaccccacgaagaattggttgatcacgctaaacgactattaacttctaaaggaaaactacatctgattcttccgattggagaagcgcaggaactaatagcatatgcacaaaaagttaatttccacataacccatcttacctatgtgcatcccaccccatgcaaacctccgaaacgcctccttatagaactatcgataaagcaaaatgcttattatgaagataatatcacaatagagctggaacgccaccgctatagcgaagcttacatcaaactgacaagacagttctatctacacatgtaactttacgcttattaagaaaattgtctggatataagaaaacaaagtgatttatttaactatcccttaaccatctaatctaaaaaactgccttatctttgtcatgtcaaaaacaaagaaagacacgtttttttcataagtttgtatgtttaggttagtagttagtaattaataagaggtcgggttaccgatctcttatttttttcaatatctttatgacctcaaaatggtcacgaattataccaaattataataacaataatagacatgagaacagaagttgcattaggaatcgacatgggtggaacaaataccgcattcggttttattgacagagaaggaaattatttggcagaggggaacattgccactaataagcatgaagacattaacgactatctgaaagagttgcacatggctatcgaaaacgttctcgataccatccgagaaaaagtagtattagtgggaatcggtgtcggagctccatgcggtaactatctgcagggaacaatcgagcatgcctccaacttacgttggaatggtgtaattccgttctgtgatttactgaaagaattttaccccaatattccggtctgcctgacaaatgatgccaatgctgcaacaataggagaaatgatatacggaggagcaaaaggcatgaaagattttatcatgattacattgggtaccggtgtcggtagcggatttgtttccaacggccaattgatatacggacatgacggttttgccggagaattcggccacatcatcgtatctcccaacggacgtcagtgcggatgcggacgcaatggatgcttggaaacctatgtgtcagcaaccggcgtgaaaagaaccgcttacaaaatgatggcaaaatacaactacccaagtgagttgcgcaacataccgtttaatgaaatgacttccaaaatgatttgcgaagcagcactgaaaggcgatatgatagccatcaatacattcaaatataccgcaaaaatgctaggtgaagcattggccaatatcgtagccatcaccagccctgaagcaattttcctgatgggtggtttgacaaacgcaggagacttgttatttggaccgaccaaagaacatatggaaatgaatatgttaaaaatgttcagcaacaaggtgaaactgcttccttcgcaacttactaaaaatgttgccatttatggtgctgcagcattggtatggaacgaactggacaaataatatgaaaaaaattattcatatacttaatctgattatccttgggagtctgctttcatgcgactctcaggataatgacttgaaaattacagaatatgtcaacccgttaataggttcactccatggtatctcatgctcaccggaagccacatgccccttcggctctgtcagattaacgccacacaagaccagagatacaataaatgccctgtcattttacaatgcaagcagttttcacccacaaaatacaccagacatacgctttctaccggttgttacaaaaccggatacaagcgataagcctgcatgctatgtcaaacaaaataatgtgacatataacaaagaacaagcatgtccgggatattatggaatcacattcaataacggtatcaaaatagaaaatgctgtaactgaacgctgtgctatcatgtatttccaatatcccaataaaaacacccatgccttaattttggatttcacatcacctgagacttgtgactcagtgatgacaaccatctggaaagtaaacaaccgaatgctagaaggatatagcaaatcacttcattccgaaaatcccgaacagacctattttgtcattgaattctctcaagattgcgaaattatggtcggcaatgaaacatttgtaccattaaaaaatggagagcgtttcaaagcacaaaacagctatgcttggattgattttggtgaaaaaacaaataaaattttagccaaaacaagtatttctgccgctaacattgaaggtgccaacagtaatcttgccaaagaaatatcacactggagctttgacaaagtagaacgggatgccaaacaagcctggaaaaaagaactgcagaaaatcaaggtgaaaagtagtagtaaagaacaacaaatggcattctacacctcaatgtactatgccttacaaacacctgccatctcctcagatgccaacggcaactacaaaggacctgacggtgaaattcacagcgcaatacaccacacccactacttggtgaatccaaactggcaatcgttgcaggatgttcctcttgttttcattatgacacaaaagaaaagagtacgagatattcttaaatcctcacaatatgatgcccgctttgttgagaaaactgcacatactgatacccttacagatattttggataccaattgtcaatatattctttcagctatcggattttatgatacagatgataccaatagccaactacaattaggaactccttcttttgaaaaaatcgtaatccgcacagcaccagacaagcgctttgtcataacgaccagcaaggaatcagacaaccatatttatattaacgaagtatggctaaacagaaacaaactagaacgttcctgggtcagtatagaagaaattatgaagggtggaaaactgaactttactctaataaataaataataataacgtgtgcatgaaaaacgtaagtataattcttgccggaggctcaggaagaagaaccggaaatgatattcccaaacaatttttacaagttgccggaaaaactattttagagcatacaaccgaaaaattcgacactcacccagcaatagacgaaataactattgttgttcctgaaaaagagcttgaacatgcacaagaattatttccaaaagaaaaactccataaaaaattaaatcttattatagggggaaaagaacgttatcactcaaccctttctgccctagatttctatagaaacgaaacatgcaatctattaatacatgatgccgcccgtccacttgttacgcaccgcattatctcagacgtgattgaagcattacaaaaatatcatgcagttaatgttgcaattccagctacagacaccattatagaaaccaattctacgcatgaggttattgagcgtatccctatgcgagattttctatacatgatacaaactcctcaaggtttttacaataaaacattagcaagagcctatgaaaaggcactccaagatccagactttaaaacaacagatgattgcagtgttgtaaaaaattatttacctgaagaagctattggcattatccaaggagatactaaaaacttaaaaattacacatgcagaagatatcgcactattagaatatcttctacaacacgtttaatagtactcatttttttgtatctttaataaattatcttggaataaatagcatataacaagcataaatataaacatcggtcttgaatcttccatggtaagtataaaaatatttcccgatataaacaaggaggatataattgctattgccaaatataaataacatctatgccgtatcattctgattataggacacacaaaataacataaaataaatacaaggcccagaattcctgcatccaaccaatattcagcaaaagtattatgtgaattatgagtttctatggacaaataaggagatgttgcataccattcatcagcccttgcatttttatatacccctaacccccaatacttatattcactccaatgactgaaactctctttcaaggcacctaatcttgatgccacagtacctccaacataatttccctcttgcacacctataatttcttgtttcatttctctgtaacgatcaacatagacatcagaacataaaacatatccaccaacaaacagcaacaaccctaaacaaagagaaagcagtttaaagcgaagcgttttttttgaccaatataaaacagataatatcagcatacctacacaaagagacaagatggcacctttggcaactgcaaatgataagaaaatcaaagagaaaacaaaaataacgatactacctaataattctcgtcgtttagaaacagcattatcgtattttaaaatagcaaaataagaaatcaaagctgaaataaccaaataggttgtttgcggttctaaataaacatatccacccaacatatccatattacaaccaaatcgacttgtatataaaaaagctatagcttcagtcggttcagaaaatactgaaagtcctgtaacacaaaaaaatttagtaaaattcaataccaaaacaccccaacaaaaagacttcaaagctttccataaagcactaggtgtcattattttttttagagataacagataaagagtgattacaaaaaaatacaagagcaatggttctgttgttctccacgatattttatatccaactgactctcccaacaaagaaaataaataatgcaccactaaataaatacatacaacaataggaagcatcaaatatttccactctttccgtacttctttaaaaaaactcttaggatctattgcaatatttacacataaagcactcaacaatactatataaaaagtgacattataaagaacatttatactccccagtaaaaaagagagaataataaaaatccatatacgaatatcttttagcataaacaagcttattactattttctgccacttaatatagaaaatatagctacgtatactttctatttaaattttatccaatcctttagtatatttcaaccaataatacttcaaaggatttttatatttaagttgtttccaaggacgactactatgaggcctgtgtaatacaggcaatgtagtgaacaaatagttcttaaaaccctctttcaaagactgatgagatattgtaacatcatgccaatttttttcagggtctaacaaatggaaatcaaatttacgcaaaaaattcagcgtcaataaagagcagcaaaaactgcaatgtcttttttcagcatataccatattttcattaccctgagcaaataaataaggataattaatatttccatgctcatcaacagtaacagcagctgctatcccacaatcgcttctttctaatgctccatcaaataaagactgcaaagtttcctttttcaccaaaacatctgattcaacaatcaacaaaccagcttcagctgctattgcccgctcctgagctatttgcaacacaaataaatagtttggagaaggatgtgtggttatatcagaaagattcactaattcgaatccccatttttctgaggcttctttcaatcttgccgtattttcagcagtactgaaatcattatacacagtataaataaaaggagccttcaaatcagatgacataacagcttctatggtttgcaatgtcaaatcaatagaatccttaacaggggtaattatatgaatactttgcattctgaaatttcttatttatttatacgactcacttacattgcaaatgtaaataatactttgcgttttaccaaacttagcttcaaacaaaagagtgcttatttttcccgaatataatcaataaatgaataatcaaaatcatctttatcgctagccgcacaatctaatttactcacctctttccagattgcagaatctatctttggaataaaggtatctccttcaacgtgagtatgcaccaccgtcaaatataatttgtctgctaaattccacacctccctatatatggaaccaccaccaatcacaaatacttcatcctcatcctgcaccatatataatgcctccgctacacttgtagccacctcacatccttctgcttgatataaattattcctagaaacaactatattccgtcttttaggcaaagctctacctatagattcaaatgtccgacgccccataattacggtatgtccagaagttattgccttaaaatgtttcaaatcagaagacaaatgccaaacaagactattatcgcgccctattacaccgttctctgcggctgcaacaatcatacttaaaatcataaaaataatcgtttaatccttaattccgcaacactattacaaatataactttttaagtacctgagcaacaaaaagttgctcaggaatttgccatgtcagatttttcacctatcttagtgttgcaaatcaaaatatgtatcaaacccgacagacatggcaaaggtagcaattaaatccgagaaactcactccttttggaggaatattttcaataatggagcaatttgactccagactctcatctgtaatcgactcaaccctcggtatgagatgcaggctgtatggttatcaatacagcgaaatcatccgttcgcttatgagcgtttatttttgtggcggctcatgcatcgaggatgtcaccactcatctgatgtaccacctttcgcttcatccgacacttcgcacatgcagtgccgacacgattcttagagccataaaggaactgacccaggataacatttcctacacatccgacactggcaagacctacgacttcaacacggcagacaagctgaatacactgctcctcaattgcctattgtccacagggcagctgaaagagggcgaggggtatgacgttgacttcgaccaccagttcatagaggctgagaagtttgatgcgaagcctacatacaagaagttccttggttatcgccctggcgtggcggttattggcaacttgattgtcggcattgagaacagcgacggcaacacaaatgtccgtttccaccagaaggacacgctgaagaggttctttgaaaggtttgaacaaaacaagcttattatcaaccgtttcagagctgattgcggctcgtgttctgaagagatagtggaagagattgctaaacactgcaagaccttctatatccgtgctaaccgatgcagttcgctctacaatgacatctttgccctcagaggttggaagaaagtggaattgggcggcattgagtttgagctggcctccattctcatcgagaaatggaaagggaaggcataccgtcttgtgattcaaagacagaagcggatagacggcgaactcgacctgtgggaaggagaatacacctaccgctgcatccttacaaatgactacgagtcttccgagaaagagattgtcgaattctataacctccgtggagggaaggaacgcatcttcgatgatatgaataacggattcggctggaacaggcttccaaaatcctttatgggagaaaacacggtgtttcttctgcttatggcactcatacgcaacttctataaattcatcatggcgaggcttgacgtgaagaggttcggactcaaagcaacaagccgcatcaagacgtttgtctttaagttcatctctgtgccagccaaatgggtcaggacatcaaggaagtatgtgctgaatatctattcatgcaacaatgcttatgccaatgtgttccagaatgactttggataacaccgacaacttatagtcgtgattttgcgtattgcctcaagtcgcatggtggggtaaggggcatttatatgtctttatggtgacattcgatgcactgtgccccctttttactaacgatgcagattcttttcgcttctgtatcatattaggcgcgtagttgcggatttgaggttaattattactacacagaaatttcacccttgatatgaggatgtggattataacctaccaattcaaaatcttcatactgaaaattaaaaatatccttcacttcaggattaattatcatttgtggcaactccctaggcgctctagccaactgagtttttacctgttcaatatgattcaaataaatatgagcatcacccaatgtatgcacaaattctcctgcttgtaatccacaaacttgtgcaatcatcattgtcaacaatgcgtaagaagcaatattaaatggtacacctaagaacgaatctgcactcctctggtatagctgacaagataaacgtccgttcaccacataaaattgaaacaatgcatggcaaggagcaagtgccatattctctatatcaccagcattccacgcactaacaattaaacgtctagaatctggagtattttttatatcatgaataacctgggagatttggtctaaatgcgaaccatccggttttggccatgaccgccactgataaccataaatatgacctaaatcgccatgttcgtcagcccactcattccaaattcggactccattatcctgcagatattttacatttgtatcacctttcagaaaccataacaattcatagataatcgatttcagatgcagtttttttgtcgtcaacaaaggaaagcctgcttgcaaatcaaaacgcatctgatgaccaaacacacttatcgtacctgttcctgtgcgatctgttttctcggctccttctcgtagaattctctccaacaaatctaaatattgcctcataacaatctaaataagaaattatccgcaaatataatattttttaagtataacatatcccctaggaattcaatacacagagtagtattccattattttttgcgaataagcattaaaccatggcgaaccggaaacataatattttcaactcgagaatcctcttggacccaatcattaaattccaaaattcctcttgtttgagcatcctgacttttgctatccacaaccttaccatcccataagacatcatctgcaacaattaaacctcccgagcgcacccgatcaatcactaaccgataatattccacatactgtcgtttatctgcatcaataaaaaccaaatcaaacataccatccaatgtcggaataatctcacatgcatctcctatatgaaaatgtattctctcacaaaatccactacgttctatatattcgcgagtaaaatcttctatttcatcatttatatcaattgtatccaacacgcccctttccattcccatcaccattgaaatagcagaatatccagtatatgttcctatttccaataccctttcagcctttatcattttgcatagcattttcaaaaactgaccttgcatatttccagacagcattctaggacgtaaaacttttctgtgagtatcacgcgacaattgagctaaaatgtcaggttccttttctgaatgcttttcaatatattcttccaaatcgaccgttatttccatacttacacaacttacttatacaccaataccgattgcttatctgcagcaaaaatttcctttgcaacttgaaataaaagctcaggagtcaagctttctacttcagcacaaatatcctccaactcatccaccttcccataaataaggaagctctttcctatagataacatcatattctcataattttcagatgacaacgtaatttgcccaaccatttgacgtttagctttacgcaattgcacaactcctaattgcttctcgcaaagtactgccatctccttacgaaccaaacgcaaacaacgctcctgatcctcagcatcacaaccaaaataaactgtaaatactcctgtatcagaatatggagtataagcagcttcaatattataagccaatccatatttttcacgaatattcaaatttagcctggaattcatacctgtaccccccaatatatttaccaacaacgacaaggccaaacgattatcctgcatataatcatatgctacattacctataatacaatgattttggtatgtatctttctcaataatatgtatttgaggctgatatatttccggctttaaccgaaccaaaggattctcatattccggtatttcgccaaaataacattcaaccaactttactaatttttcaaaagaaaaatctccaatagaactgataaccatcttcgaaggagaataattcctctttacaaacttcaagatgctatcacgattcaaccctttcaccgcctcttcactgcctaatatattacgtccaataggataacctctatatatcaattcctcaaaatcatcaaaaatcaattctcctggactatccttatatgaattaatctcatcaagaacaacctctttttctttctctatttccttttccggaaaaatcgaattgaatacaatatctgcaaacaactctaaaactcgttcataatccgtaggcaaaaaagaagcatatatacacgtatcttccttcgtagtatatgcattcaactctcctcctacatcctcaattcgacttaaaatatgataagcttttctcttttctgtccccttaaaaatcacatgctcaataaaatgagcaattccttcctcctccggttgctcgtcacgacttcctacaccaataatcaacccacaccaagcagcttttcctgctatctgctgatgaatcaccttcagtccattcttcaaaatataagtctgatacatattcactgaaacaaccattttttataaagaaacctacgattctgacattttcatttatcagaaccgtaggctcattaaccaatctctcataagagagtgtttattacaacacgatatttgtcaatcaaacaaaaatcgataattattgttgaaataatttttcaaaatctgccatagaaatttcttgctcttccaacttcacattttcacgaataacagtaaacaccttattatctagagctctctcatacaaattatggcgttgtttttcatcttccaataatcttgcagcaaaaccatccaactgttcatcagttaaaccatataatccatattgctgtaattgagcagctgcaatgttacgagcctcaaccttcatatcttcagtttcaactttcacatcatattccttcataatagcaccttttaccaagtgccatttgaattcatcacgataagcttcgaaatcccgatcgacttcctctgctttcacattttcattcacagcaacaatccaacgtttcaagaagtcttccggcaaaacaacatcttcattcttctttacaaatttttcttttgcatcaattgtaaaacgatattcagaatgattcttcaactgtttttcaatatcctctttgacacgagcacggaaatccgcaacatcttttacaactccctctccgtacaatttggtaaataattcttcatttacctcagcatcaacataacgtttgatttctttaatgataaagcaataatattcaccagctttttctgcaagatccttattgacgcccaacattgctgcaaaatctattttattaggataagctttcacagcattgaatttcacttcctctcctactttctttcctttaaaagaattcagtgcctcttcatctttcatataatgaagcgacatagaagcatcttcattcttaatgccaccttcttttatctcaccattttcattcaattcaatcaactcacctttcaggtattcatcgccttcaatcacatccacctctaccatattaccattattcttacagataccctcgatctgcttgtcgatcatttcatcgtcaactttaataatataataaggcactttttcacgcttgctcattttaacattcacttctggagccaaagcgatatcatacaagaattcgaaatttccaccttcaaaatcccatactgtttctgcagtttcatttggcagcggttctcccagaatctgtatattattatctttaatataattattcaaagcatctcccagcacattattaagctcatctaccaacacagattttccatacattttccttacaattcccattggagttttgccttgacggaaaccattcacaacaacttttttctgataatccttcaacgctttctctacgcgttctgcataatcctctttaactaattcaaccttaatggttgcattgagattgtcaatctggtttttacttatattcatgccaaattatttgatattatactatatttctattagaaaaaagccaccttttataaggcggcttccttgctcagtacgggcgaagggactcgaacccccaagtcttgcgacaccagatcctaagtctggcgtgtctaccaattccaccacgcccgcatgccatattttgacatcgcaaaagtaatattaaaatccaaatactcaaacctaaaacagatttttttttgcttacaccccaagattattataaataacaatattttctgatatttgaaatattttttataactttgtaagcaaatcattaataccaaaatacacaatgaacattcacttactattgactatttatataggcattttactttttattctttccgcttgtaaagagccgactaacttagaagcagaaaaaatcataacaaacaacgaaattaaaatcgagccccaagagaaaatctttttagaaaatgcacaaaaatattttgctaaaaaacgagcaaaagcatttaagcactctacagataaaatctcttactattcattaaaatcgaaagacattagtgaattggccttttcaaaactaccttactaccatctagatacttcgtttatttctcaaagttcaaactctgacgatttacttagtcacatccgcccagtaaaagacattcctttatatatcggtaagttacaccatgactatgctattataatgaaccttcgaccttgcaaagaaaacctttgggaaccggactttactttagaaggaatcgaatattttcaaaatttattcaattggttatccaaagctttaaatgaagcaggaactcaaaaattttacgtccttgaatccatgggaatacactacattgtatattatacaaaaccgaacgaaccccatttttgcaatttcccaggtaatatacaaatgaacaaacactcctttctccaacatattttagatagatacaacaataatcataaaacaaaataactatctttagcccataaaaaaaagaagagttgtgattgaaattaaaaacatctataagagttacggaacattagaagtactaaaagggattgacctcattatacctgaacataaaattgtgagtattaccggtgcaagcggtgccgggaaaagcactttattgcatattctagggaccttagatcttcccgaaaacggagaggttttatatgacaatcaaaatgttgcgcagttttcgcagaatcgtttagctgcatttcgtaaccaaaacatcggatttgtattccaattccaccaccttttgccagaatttacagcacttgaaaacatctgtattccagcatggatcaaaggagagaacaaaaaaaatgctgaaaaaaaagctctaaaactattagaactactaaagcttaaagaacgggcaatgcacaaaccggcagaattatccggaggtgaacaacaacgagtatctattgctcgtgcactcatcaattcacccaaagtaattttggcagatgagccctctggcaaccttgacacacagaccaaacatgagctacatcaattgtttttcaacctccgtgatgaactaaagcaaacctttgtaattgtcacacatgatcaagaattagcaaacatgtccgacctaacaatatttttacaagatgggaaaatactgtaagtgcaataatcattgtttaattcttgacttacttttgctctccatccatcttgtatacaatgattcccaacaagataacactttattctctgctacaccactaccataatttatagcatcccgacacgactccaactgcttttccaaagcatcaccaaaggacctccacaccatcatttctgcagaagtttgcgacctatgccgcttcctctcattcaaccaattttctaattcaccttccaacacacaaaatatttcatgactattttgctttcgagcccattccaaccatctattaagattaaaaaattcaccccatattctcatcaagccatctctagtttctcttgcatcccggccaaacatattttcacgaatataatcagtagcaaaatatcccgaagcactctcttccaataattccaataaacacttcacgtcaccttcttcccattttcctcgtttaaaaacagatatgtattcatcctcctctaaaatcaaacattgctgatagtaatcaagcacagactcaaagctcagttgttctaacaattctttacgttcactacgtaacagaacaaacttttcccacaaatcacgatcactcattttctcctcttttgccattaacccagtccaatctccagcatatacataacgcaatgaattccatacatcatcttccgcaactccacttttcaactttgcttcatcaacacccaacaatatcagtaacccttgcataatttcctcttctatacacttctcgtatgcatactcctttgtactcatttcccactttccatcacaatctctcaccatattactcaactgccaacgtacaattttttcatttatatctttttctccaaccaacatacgtccaaacaacaaatgccccgtcgcaggatgtgccacacaccttacaaataattcatcctcattccccataaatcctattccacattgatccattgcatttagtggctgatttttcgattccaatacaatacaatctgcgattcctattctttgcattattttagctattgcattctgcactcccctgatataaaccggtggcatactaccatcaacacttatttttaaaggagcctccttcgaaatctcccaatgaactcctctactacatttcacactcccaaatggactaactccataatccaccatttcttgtgttcggaatggactatcaggatacataacaaccgtttttccattatttttcggaagtaatttaaatgccaccgaaatatcaacatatgttaccccattctctgccgccatctccacgattccctgtttataactggcatgcacacaatgtcgtactctaaaacaaactccactttccaaagctgtaacatccaataccacaggtttctcgaaacttgatatccgtaaagaattatcaaaacaataccattcccccggttccttaagccactccgtaatttcaaccagataaccactccccatacgcctatctaccgtccaaatttcttgagacgacttcaatcccttcaattctatttccaaattatcagaaagtctatcattttttgttacttgttccgtcaccgtcacatcacaaacatccaaattcatacctttgccggatctcaataaaaaaactcctttagactctaataattcaccatgttttcccttacctttatctacttgagctgtgattataaactctcgattcaataattcttctgatatcaaaagataaatcttatcatcaaacttatatacaggcaacaaaccacctgcaactatattttcgtctgcatgcttatcttgagcactcacctcacttaacaatccacaccaagagctacacaaacaaataataaacaataatactttcaaattcatcacattcccattatcaagtttacattatttttccaactatcccaaaatgctccgcgatatattctcacgctacgtaccatcttttgcaaaccatttcttaacaatacggcaacttccggataccttcccccttctgctttcataaaatcggaaatactctctgtatatctccaaatcaaaaaacgtccccaagcactatccatatcctcagccagcaacatatctacaacagcatccaaatattccgatacagcatattctccaataccattacgttcacagtccgcaacatacctagatctaaatactaatccatcaacgaccattcgtccccactcttcccgccattccaatggccattcaccagttcttgataacgcatatgtctgcaaaaacgccaaagccatttgctgctcccccttagacactggcaacaatttacaagaagcttttccccaacatttccgacatcctccaatgtaacataaagcctgatttaaatactcagaatactgctcacgcactccattgtttctattttctgcaactgaccatgcccctattccccatttttcaatatggggggatacaacacctaatttaaaaagtttccccatgccaatatgcgctgtttccaatgacactcgccccaaatcttctgcttgagcctcaggcattgtagtaaaagcatcttggaaacgataccttctctccaactgtttctcatcaacccaagattccaattgtatggcttcctccttaggagtacaaccagggaaacaacgatatccccactcaatagccaatgaatcataagctcctatttgtggaatacaactttctatagaaaaaccatcttcctcactcactgcataattaagccgcatataatccattattgaactaccatgacgtagtttactcatcaaaacagaatctctcaattctgcaacttcataaagagaacttccataaaaattatgtgtcaaacctaacgtatgccccacctcatgagtcacaaccatttctaataacttacccaatacatcatctgtcaactgctcaggctcttttcctaattgtgccacataccatttacataacattttaaatacagaatgaaatattgcgatatgacaacttaatatctccccggtccgaaaatccacataagaacgcccataagcattctccatggaaccgattttataaacaatccaagataatgctgcattatccaacacgtattctgcagaatcaggagcaacctttccctctatagcattcttaaaaccgcaacgctcaaacacagcattccaattattaacagccttcaaaacatacggccaccactgttgagggaactttctatccacatacatgattatcttttgttttggctccaccaactcaccacgcttatatcttgcagtatccttatctgcaacctccaaacgccatcgctgtatagccttcttcttctccaaactcaatgtatgctccttaaactgagaatatggcacttcaaaatatcccacattgggcgaagcataacgtaccgacatcaaatcttctggcaaaagattcaagcaacaacctattttccagcgagtctgctcctccgatccctcaccagacatcatatccaatccaccatacaccctttctgaacgcacaatcacaccattcgacaaaccgacaatttctgttattgtctgagactgttcacttcccaatcccagcaaaaagaaaaaaggtctcaaactccacaacttccctttttccaaccattgagtcacatcaatcacaacaccctcttccttataatctatcactttaaatttttgcaaaacaataggctctaccccctcagaataaaccttcttttgcagactttcatcaagtcccgcaacataatccccaacttgctttacaactacaaaatcatcatctttttcaaaacgaataatattaggaccaaaacgatctccaatatagccaaatttatcatcagcagacttattgggacgatctgcagcttcaataatagttgtcgtcaggctcatatcacgccctaaaacatactgagggatagcccacaatatcttgtctttttctcgataagttgtaaacaacccccgaatcacttcagtctgtccacacaacggaattgtaagaaacaatccgaaaatacaacaaaaaaacttatacaacatattcaatatcatacattaaatatcattactcataacaaatcctcttcatccattcattacaaaagcgacaaacacaacaaatagggtgatattaaaaggaatatttttttcaccgcacctttctttcctatatttcgtaaaatctaatatatttgcgcgtaattaataaatctaattaaatataataatgaaatacacaaacgaaattgacaaagtcagctacagccttggattaagtatcacaagcaacttgatatcatccggaataaaaaccatcaaccaagaagcattcaacgatgcaatgaacagtgtatttgctggtcaaatgccggagattatgccagacgaagcaaacaatatactccagacctatttcgaaaaaatacaaaatgaaaagggaaaagaagccaaagaagctggagaaaaattcctggcagaaaataaaactcgtgaaggagtagtaaccttggagagcggtttgcagtataaaatcttaaatgagggatccggagcaaaaccgacagccaacgataccgtaaaatgtcattatgaaggacgtttaatcaatggccaagtattcgattcatctatacgcagaggtgaaccggcagaattcccggtaggcggagttattgcaggctgggtagaagctctacaactcatgccagtaggctcaaaatggcaattgtatattccgtctgaactggcttacggacaacatggtgcgggcgcagctatcggtcccaacgaaacattgattttcgatgttgaattattagagattatataattaaatatcaatatttacaaactaaatttattcaagcatgaaagctaaaaacttattactgactttggctgttggtgctttggctgcaagctgtaacagtggctccatgacacaaactaccgcaaatctgaaaacagctactgataccgccagctactatctaggattcatgtacggcaccggaatgcaacgcatgggattaaaagacgcaaacatggaagctcttgtggcaggtatgaacacagcattccaaggcaaagaaacagaagccaacccacaagcaatggaaatgtatttaaacaactatttccagcaaatggcaatgaaacaagcagaagccaatcttgagaaaggacagaaattcttagcagaaaatgctaaaaaagaaggtgtaaaagaattggttgacggaatccaatacaaagtaatcaaagaaggaaacggagcaaaaccggctgaaactgatgttgtaaaagtacattacaaaggaactttgattgacggtactgaattcgattcatccatcaaacgtggcgaaccggctgaatttcctttaaaccgcgtcatctccggttggacaaaatctttaaaagaaatgcctgttggttcaaaatgggaaatctacattcctgctgatcaggcatacggtcagagaggtagcggccctatcggtccgaacgaaactttgattttcgaagttgaactgttggatatcgttactccacaagctccagctagtaaatagccataagacaacaataaaaatgcgatggacaatccatcgcatttttatttatacccgtttccctatttcgcttcccgataccgctttttttatatacttttgcaccgcaaaaatttcaatcttataaccacatgaattacgaaataagcggaaaactgatattcaaagaagaaacccagcatatcagcgacaggtttcaaaaaagggaatttgtcatcgaagtagaaaatgacaaaaatccacaatggaatgattttgtaaaagtacaactgatacaagacagatgcgatttgcttgaaaacatcgctctgaacgataatataaaagtctatttcaacatccggggaagaaaatgggaaaataagggacagacctcctacttcacaaacctggagggatggcgcatagaaaaactggaaccacaaaatccggctgacattcccgtaccggaatatcgtatcgaagatattccttccatgcccgaagctgacgaccttcctttttaacaatatatcagcctgacaactctgtcaggctgatttctttaaattccttacaacaaccgctgctggttgatgatcaactcaaatttaatcttcaaaaattctgcagcctttctgctcagtaacatgcgtccgagaaaaatctcaaaataatccatcacagcagaaatctcggtatcaatcttcaaatccagaataatcgcagaattatcttcgttaaaataaatctttgactcttccactgcataattcacacggtcgtggatatcaaaattaccaaaatcacgattacgtacccgactgcgacgcacatctgtcttatccgccaaaatcaaagccgcagctataggattcactgcaacggcagtactctcatcatgattaccgatagcactgattacctgagcaatttctcttgcctccatccccatgttatccaacaaacgaaaagccaatatagctccgctctgtgcatggtcaatccgattgacaacattaccgatatcgtgcatataggctgcaattttagccaattcaattacccgctccggataccccaatgtccgcaaaatcttttccgcctccacagccaccttacctacatgcgcaaaagaatgctcagtataccctaaagcaatcaacgacttatcagcttcgctgatatagcattttatgctttcattgtttttcacatcctcaaatgatatagccataactcaaatcatatttaattcttcaaacatttttctgtacacagccattttttccccaagaggtttcggatatgcccgggaagaagatggcatacgataaaaagagagcaaacgcccgtcacatacaaattctgtgcagcaccccactgcaggctcctcggcatctatcaacgcaagcaacgtatccgtagccttctgtccggttgttacaaccgcctgacaacaaggcaaagcttttaatacttcatgtatatccatcgcctgcaccacttccaaaaacttatcagaagcattatccttcaaccgcacaaccttccgagccgtatccgacaaagctattcccttctctaaaagaaaactacgaatccgctcctcacaaaacgacttacggtcaactgtcagaaaataatccttatcgtcaaaaaacacaccaccgaaaatacgccacatatcattttgaaaattaggataataaaactccattttccaacgttcccgtttagggggaaaacttcctaacatcaacaagcgggcatcactaggaaaaaaaggctccaaaggatgcgactccacattcgcacataaaggttcttctttcatattcaactaatcaatccgtaatgacgaagagcatacgcaactccatcatcatccacgcttttagtaataaaatcagccttagcctgtacatcctccttggcatttcccattgcaacccctacacctgcatactccaacatcggaatatcattgccaccatcaccgaaagccatacattcatcccgactaataccgaaatattccaatatttttgccataccgatgctcttgctgccacctttaggaacaatatccgtaaacaaaggattccagcgagtagcttcacatccgggcaattgcgtcatgatacgtctttcctgatgcatctgaaaaaagccgattaactggaaaacatcctctttcaaagcttcccgtatatcacgctgcggaggttccggaaaattcaacatcttaaaaataatatccgtatgctcatttacataattgataaacatatcgttagcccgaacaaatatacaagggaaacgttcacctgctgcttgaagctccaacaaatgccgtatatcatcagaaggtatcaaacgcttgtaaatcaacttattcttgcctgcataacaacaactgccattcaatgtaatatatccatcaaactccagtccatctaaattattaatcacacgccaatgcctaccggtagcgataaacacttttacaccctttgccctcaattgggaaattgccattttagcagactttggaatacaatgagtctgaaaactcaccaaagtcccatctatatcaaaaaaaactgctttaatcacctcccttttctatttaatatcgctaattttacatacctccaaaaatgaagcccctctcacatgtccaaaactacctccaactaccaaaatttgatcatccggctgatatcccttttcaagcaacatctgcggcactcctctcataaactcatcccttgagttcggacgctcagaaaaataagcctctacaccaaaagaaagagccagctcacgcataacccttttctcgtaacaacgaacataaaccggcaagctaccacggaaagcagacaaataacgggcagtccgccccgaaaccgtatctataacaatagcctttatgggcaacatcgttgtcatacgcaccgccactctagccaaggctgccgtagtctcattattgatacgaattaaattacggtttgaatccggaggtgttgtcggctcattagcctcagccacccgcgccatcacctttacagcctccagcggataagctccataagctgtttcaccgcttaacatgacggcatcagtaccgctaaacaccgcattggcaatatcacttacctcagcacgcgttggacgaggatgttcaatcatcgtatgtaacatctgagtagcaacaatcaccggcttcttgctttcaatacacttatgaacaatcatcctctgtatctttggtatcttctccgcatcgatttctatagccaaatctccacgcgctaccatcactccatacacatgatccagaatttcatcaatattatccaccccttcctgattctcaatcttagcaatgattttcaccggactattatgctcatccagtattctctgtatcacttctacatcctgtttattacgcacaaaagagtgggcaataaaatccaacttattttcaattgcaaactcaataaaagtgcgatctttttcactcagtgaatccaaatgaatatttccccccggcacattgatacttttacgattctttatcacaccgggattggaagctatcaattccaaacggttatcatccttaccatacacaacaaactccacatctccgtcgtccaccaatacacgcgcccccacaacaacatcattcacaaatccagggtaagaaacatgaatcattcgctcatcattttgctttaaatctccactcatgtaaacaacatctcccttagcaactttgaccggctcatcaatattcacagtccgaacctccggtcctttcgtatctatcaatagagctatatcatcagacacttttcttacattattcaccaccttcatggcgtcttccaaagtctgatgagctgtattcaaacgcaccacattcacccctgcctcatacaattcttttaaaaactcgacatcacacttcctatcggaaatggttgccacgattttagtccttttcatatctatattattagtgtgctcatttatcttccattacaaactccaataaagccagttcataagattttaatccaaatcccataaccataccacgacaaaccggagtcaaatacgaatgatgcctgaaagattcccgacgtgccgtattagaaatatgcacctcaaccaccggaatattcactgccgctatcgcatctgctatcgcaatagatgtatgagtataggcaccagcatttaaaataattccatcatataagaatctggatgcatgaatcttatctatcagctctccttctatatttgactggtaataatcaatctttacctccgaatacttatctcgcaacctttccaaataattctcaaatgactcattaccgtacacattgggctcacgcgttcccaaaagattcaagttcggtccgttcaatatcagtaactgcataatattctcatttaattaaacaatccgattgtacaaatttaatgaaatttcttgcgattctatttcaattctgcgtatctttatccaaaaatattggtaaagtgtattcgtagaaaaaatagatagttgtaactttatatataaaaatcatgacatgggatagcgcaatagaaagctacagaacttacttaatattagaaaaatcgctttcaacaaattcaatagaagcatacattgcagatatcataaaattatcaagatattgcattgatacatataatataacctctcctgctggagttacatatgaaacattgaaacaatacttgatgttcataaatgaaacgggcattaccaaacgaacacaagcacgtacaatctcgagttttcgttcatttttcaaatttcttgtctatgacggacaacttcaaaacaatccaacccgcatattggaatccccaaaaatcagcaggaaattacccaacatactaacaacagaagaggttgaaaaattattaaatgctgttgatttggacaaaccggaaggacaacggaatcgggcaatcattgaagtattatactcctgcggattacgcgtatccgaacttacctcattaaaaatgtccaacatcaacttcagaaaaaacttcatcaaaatagaaggtaaaggcagcaaagaacgcctgattcctctaagcgatcgtgccaaagatgaaatcatgaggtatacaactctgtaccgcaatttattaaacattgcaccagaagcagatgatatcctttttttaaatcgaaacgggaaagccttgtcaagagtaatggtttttaacatcatcaaacaactggccatactagccggtattaacaaaaacatatcaccacataccttccgtcactcttttgcaacacagctagtgacagggggagcagacctaagagccgtacaagatattttaggccatgaatccatactcacaacagaaatatatacccatttggacaacctttttttaaaagagaccatggaaaaatatcatcctagagctaaaaaaaataagtcttgataacatacaactatggctacttggcagccatagtttttttgtgtattttcgtgcgcaaaatttaagccggttatggaaaacaacacagaaattcttacaaaaatcaatagcggagacgctcttttaattgccgaagctgtacaggcaatccaagaaaacggagacttgaacatagcagaatccctgctaaaccagttggaaagcattaaagactcgcatatcattaccattatttccaatcttctagcagatatcaaagaaaccaaattccgtgaattattgattcaaaagcttcaaaatgccacggataccaataccaaaagtgctttgctgcgcattatatgggaatcatcattggactattccccgtatttggaaattttcctacacctcttgcaagaagaagattttgccgtagcattcgaggcttcaacagttatcgaaaatatggtacacaatctgtcggacaaacaattcgaacaactgcacgaactgatacaccagtttcctgaagaaaaagcattcctgatagaaaatatacatgaagaaatgaattgcaaggaggagtgattttatcacccttccttccaccattccatgacttgtccgaccctttcatccatcggcataccggcatccaaccaacggatatcaaatccgtctcgttccattttacgaaaccaggtcatctgtcttttggcaaactgatgaatggcaacattcaactgagcgaccatttcatcataagtaagttgtccgataatatataaagttaaaaacttatattccaagccataatatatcaaatcctccggagccacgccactatccaaaatccgtctgacctcatccaccataccatgctccaaacgctcatgaagacgctttgtaatccgctcccgacggacttcccgactcacatctaccccgactatcaatgaattaatcatcggaaaatctttttcttcatagggatgagtccggtaatactcctcaatttctattgcacggatagcccgcttagctgtatcaatctctgtcgtattatgtaattttttataagaagccaatttcacggcaagctcctgcaacgtcaatcccgacaacaattcccgcaatgcttcattaaccggcacagccagtagtttatacccctttaataccgcctcaacatacaaaccgcttccgccacataaaaccggcaccacctgacgccggcaacagctattccatacgtttagaaaatccgactgatattcaaatacattatatttatctccggcatcagctatatctatcaaatggcaaggaactcttcgcccatccaccacatactcatccaaatccttccccgttccaatatccattccccgatacacctgccgggaatcagcactgataatctctccatccaaagccaaagccaattgcacagcaaagtttgtctttccgctcgccgtaggtcctattacactcaataaattatacataacatatattggtttgatacatctgcaaatgtaatgaaaatccgcacattgataaaaatcgacaaagaataaggacaaaaaagagataattttagaaaaaaaagatacatttgtagagggaattaatcaaacaaccaagtataatcttcagaagctatgatgaacgatgaaacaatccagattcgggctcttgaacccgaagaccttgagtatctctataaatgggagaacaacatggacctatgggatgtaagcgatacgttgacacccttttcacattttacgctgaaaaaatatatcgacaatgcccacgaagatatatacagcagcaaacaattacgccttatgattgtacgtctggaggacaaccagcctttaggattgatagacttgtacgacttcgacccttatcaccaaagagccggactgggcattatgatacacaatacagaaaaccggaaacggggttatgctacatctgccatcaaattaatgctggactattgctttgaaacattgggactcaatcaagtatatagcagtgtccccagttgcaacattgccagccgcaagctttttgaaagtatcggctttaaccaaaccggctatcgcaaacaatggttgaaacgtggcaataactgggaagatgttatctatttccaactattagcctccgattggaacagcaactaaaaaaaataattttcaccttgcctgcaaaccatctttactgcgcaggcaagtgtattttttctaccaatcgaaattaatcctgcagagccctatataccagcactcttgcatcttcttccaatacaacatcaaaacgttcccctacagtttcatttaaagtcgcttcccaccaagaataaagccgtcttccatctattggatatttcagtcctctcacagatatcgccccatgcggataaagagaaaaaagcgacacctgttgacccggtttgcaatcaaaagaagctgtatgcaacaacggagtaaaaataccataatcagacatcatctcaatccgcttaaaccaaccggcatattccaacaatagtgaaatattacccaaggtatgatcctcccgtaatcccgtagctcccaacacaagcacctcctctatattcattctacgaatatagcgcattgccttactcaaatcattggtttcctgttcgtgctcctgatacattttcccggcataacgagtatggaactctgaaggaagactatccaaatcaccgacaacaatatccggaatccttactttctccaattcaacgaccgcaccatcacaagccacaacaaattcagcttgctgcaataagttcaaaagcaaatctttctttggaaacgaaccgtttgcgacaacaacacaccgataattatccacaataaaccactcctttctttttccaattaatccatcctacaatagccaatattccgtaacatataaacaggaaacaagtaggatataattcccgttgataatacaatactacactgacaaaattaatcacaacccaaatccaccaatgctccacaatccgctgtgccaacatccacgtagctgttatactcaaggctgtcgtaaaagcatcgcctaatggcatgggagaatccgtataatttgccagaatatagtacaacactgcccacaaaacagcagtcactgccatacatcccactccaacctgccactccaaatgcttgaatacaatacggttgccatctgctatatcagtagtttttttgacaatccgccacttccaaaagccataaatactgattaccacatagtaaatattcaaccccatatcagcataaaacttcgaaaagaaaaacacaaagacataaaccaaggaagtcagaaaacctactacccacatcgcacgatgttgccgaatttccagcaacaaataaaccaatcccgacaacactcctaaatactcaagcaactgttccatccaaacaaagccattacaaattcaatatgcccattctttattaaatacctaatccatccccctgctgttaacgcaacaaagatagtcctttttacggataattcattctctcctactaccaagtgatgatttcatcgatgatggcttgttgctctgaatatgcctaaatacgtgtatacttactccctcccatctctcccgctaacggcttcttcccccattccttcgccgtagctcccggcttctcgttcggatgagcttcggaggaacttcgggggaggaacggagaaaggtgagaggggagtgagaccccggtgagacatctgtaagtgaaacttcggaggtgcccaaaaacagattcgggaaagacaaacctcccaatagctaccgttctgctatcttttcgctaaacacaaatgtaaacggcaacaaagccgatgctttcaccacaatactttcttttttgcccaccatgataacatcgaaatctttaccataacgcaatacaacctcagacatcacctgacggcatgctccacacggtgtcacaccctcttcccttaactccccattgtagcaggctgccaaagccatagccacaacgctacaccggggatattgcgctccggcataaaacaaagccgtccgttcagcacataatccgcttggataagcggaattttcctgattgctgcccgtcacaatctcgccattatccaataatacagccactccgacagaaaaacccgaataaatactataagccgtccgggaagcccccatggctctctgacacaaatcctcgtatcccgtcggcaaaccgtcacgacaaacaaaataatctatcttcagttctcttttatccatcattatttttttatatttttacacccctaagataaaagaagaagcgataatagaaaaataaaatatgagaaattacatttttatcacaaaatcacttataatcagcatcatattatttgcatccaccctttcttttgcagagacaagaagagaatttgtgcgcagatacaaacacattgccatcagtgaaatggagcgtaccggcattcctgccagcataacattggcgcaaggcatcctggaatcaggatgcggagagtctgaattagccgtcaatgccaacaatcatttcggtatcaaatgccacgactggacaggcgcaacctacacaatggatgatgatactaaaaatgaatgtttccgaaaatatgaaacgcctgaacaatcctggattgaccacagtgagttcctgatgtcccgtcctcgttatgccggattattcaaattaaaaaccacagactatagagcttgggcaaaaggtttgaaagcagccggatatgccaccaatcccaaatatgcagatcttcttatcaaaatcattgaagaagaaggtctacataaatacgaccgccttatcaaacatccgaagggtggaccggccaatattgccgacctttcaatcaatgtggatgaatttgcagaaagtgtccaacttcaatcacaaatcaccgcgccggccaattatcgcaatcgagaagaaatgcgcaacggtatcatctgtatcgaagcccttccgggcgacacttatcaacgaattgcagactactatggtattaaactaaaaaaattactgcaattcaatgataaaagtgataccaacctttcccccggacagattgtctacctcaaacgaaagaaaacggctgccgcaagaggatatgaattccaccgagtgaaagccggtgaaagtctttatgacatatcacagcaatacggagtgcgccttaaaaatatatgccgcaacaactatctggcagccgactcggaattgactgaaggcgagaagatttatttgcgtaaaaaagcacctttactttaaaaacacatgaaaacaaacaatacattcattactaaaaactcactattcggagttttggtcggtctaagtttaattctggcgtcacttgttttttacataacgggcaaaaacatcatgctcaatccacaattaagcaatgtcatgatgctgctctccatcgccggagcatttataggagtccgcaaatacagagaagagcaactggaaggcttcatcagttatccacaggctcttggcggatgtatatatattatcacaataggatcactgatatacagtatctatgcctatgcgctatatcggtatgatccggaactacaagccagttaccttaccacactccaagtgatgttagacgaaatgtataaaggctctcctatgcttgatactgtaaaaaacatgatggaacatttggtgtctccagcttttattgcagcaacagaaacgttcaataaaatattaacaggacttatattctctctgctcatggccggtattttacgacgaaaaccacgcattgcagcatagaatccgacataaaaataacccaaccctaaaattacaatattcaatggatatttcaattgtcattcctttatacaatgaagacgaatcactacccgagcttatagcttggatagaaagagtggtcaactcacacaatttcagttatgaaattgtcttagttgatgacggcagtaaagaccgctcgtgggaactcatcgaaaccaatgccaagcgtaacgaacatatccacggcattaaattccgccgcaattatggaaaatcagccgcattacattgcggatttcaagcagcgaaaggcgatgttgtcatcactatggatgccgacatgcaggatagtccggatgaaatccctgctctttacgatatgattatgaaagaggactatgatatggtatccggctggaagaaaaaacgctatgatccgctttcaaaaactttacccacaaaactattcaatgcaactgcaagaaaattttccgggattaaactgcacgatttcaattgcggcctgaaagcatataaaaacaaggtggtaaaaaatatcgaagtgtacggagaaatgcaccgctatatccccattatagccaaacaagcaggcttcacccgcattggagagaaagttgttcaacaccgggcccgtcaatatggagtgaccaaattcggaggtcttaaccgctttatcaacggcatgcttgatctattatcaataacttttatcacccgattttcaaaaaaaccgatgcatctattcggagctataggtacgcttctatttattgtcggtttcttttcagcagcttggatcggtattgataaacttatatgcctatctcagggtatacaggcccgtcttgttacggataatccttatttttacatatctctggtatgtatgctactaggcactcagcttttcttggctggttttgttgccgaactgatttcacggtcatcatctgaacggaacgtatatctgatagaaaaagaactataacaataatacagatacaaaaggtgaggaaaaattcctcacctttctgttttatattccacaactttccacaacaatcacccaaggcaatcatgccgcatcaacatacatatctcttactatcaactatataaacatatatcagaagaatgttcatttttctggcatagatttctctttatgtttaaatgcacaaaaactcaaagcttcgggctatcacatacactctacttctcattccctatgaaagccctatcagcctcccgatacgatttgggaggctttcttctttttcaaaaaaacattatttttgttgaataaaaaaacaatttattggaacgcaaaatcatacatattgacatggatgctttctatgcctccgttgaacagcgtgatcatcctgaataccgagggaaaccattggctgtaggacgtgctgaagagcgtggtgttgtctcagcagccagctatgaagccagacgttatggagtgcgctcagccatgtcttccatgaaagcccttaaattatgccccgaattgatttttgttcccggccgacatgaacactacaaagccatctctgctgaaatccattccatatttcacgaatataccgacattatcgaacctttggcattggacgaagcttttctcgatgtaacagagaataaaaaaggaataccgtttgctgtcgatattgcacgcgccatcaaacaagagattcgagagcgtctccatctgattgcttccgcaggagtatcttataacaaattcctggcaaaaatagcctccgactaccgcaagccggacggattatatgttatccatcccagcaaagctgcagattttatcgcacacttgccgattgaagcattttggggtattggaaaagtaacagccaagcaaatgcactctttaggcgtacacaatggagcacagctcagaatgtgttctttggaatttctcacccgcaactttggcaaaacaggacagcaatactataattttgcacgaggtatagacttgcggacagtggaaccgatacgcattcggaaatctgtaggttgcgaaaatacttttgagaaagacctgacaacccaaacagccctcatcattgaactttggcacattgccaatgaattgatacatcgtctcaacaaatccaatttcaatggccatactttaactctaaaaatcaagttctatgatttcacacaaatcacacgcagcatcagtgtcaatcaccgactgagaaccatgcaggaaattctgccgttagccaaacaactgctctatgatttacatctatccgactatcaaatccgactgatgggactgacagtctccaatcctcttgtctgctcgaaaaacagccctatccaactgacactagacttctgacaactctccatttatcattgctatatactcatgcaaagctcgataaaatgcatgtcgtgtcaaagtttccgcattccctaaaatcaccagtttcattcgggcacgggtaatcgccacattcatccgccgcaaatctcggagaaaaccaatctgtccttgtgtattggcacgcaccagactaacaaaaacaacatccctctcctgcccttgaaagccatctacagtatgaatggtaatcaatctgcggaaaggtcggaaaaatggttcttttttcaacagccggcgtaaatattgcacttgagcccgataaggagaaatcaccccaaaatcgatgtgttcatcaaaaatacgctctcggcctatacgctccatataaactcgcaattgatgcaacaataattcagcttctcctgtattcaaccgccccactccttctgaaacacacttttccgagaaatcaaaatcagcagtatcaatccaagtaacggccgtatcataatccaatattccccgatactgcacctccggagctgcctgcaaggcattgtgataaaaccaaccggaagaaaaatgcatgatatcctcatgcatgcggtactgtattttcaacaacgaaacagccgatggctttgtacgtactactttttccaaaagcgtacaatccaatcctccccgcattgcttccatgcatttaattgtcggtggcaattgacaatgatctccagccaataccacccggtccgactttcggatagcaatccaacaggcagcctctatcgcctgtgccgcctcatctataaacaacgaagaaaaacgttttctttccaacacccgattatcagcacagaccagtgtgcaagcaatcacacgagcctcatcaaacaactgtgcatcaatccgaatttccaattcagtagcacgggatctcaatttggaaagatgattatagagcgcatctttgtcagaacggcttcctgtacgcaaacgggcacttccctcacgaatcgctttgcgaatatgccataactctggataatccggatgagcctcaaaacgacgttcataagtaaaattcaacattttatcatttacacgagtcgggtttcccactcgaagcacattaatgccacgatctactaatttttcagcaatccaatctacagccgtattactttgtgcgcaaaccaaaacttgattttcacgatgcaaagtctcaaaaacagcctctaccaaagtagtcgtcttacccgttccgggaggtccatgcacgacagcaacttcacgtgctgccaatacttgattaacagcctcctcctgcgaagtattcaaccatggaaaacgcactttctgcaaatcccggaacgttgcaggcaacggtcccaacaacacttcacgcaaataagcgatacgattatctttagccgccatcacttcatgcaaagctgtaaacattatcctatacgaagtatcgtcaaaataaagttgaactcctatatcaaatgctgtcaagctatccaaaacatgtcctcctggtagcacaaccaccatccgattatcttgtacataactaacaacgccctgaaaattaaaataatgcagcgatccatcagacattattttgaaaaaacagaccggacggccgtattcaaattggtgatcaatttcttcattctcttgacgatatacctctattgtaaactgattgagcgaattataacgacttgcacccaacacaaccggataccaacagactccttgctccaccttccgatagataccggcttcacgggtattttgctgatacatttccttttcacactcgtattccttttgcaacaaatccaactgattctgtaaatccgatatagaagaaagtcttttccccgacataaaaacaatgtttagttgcagacaaagatagggaaataatataacaaagatttataaaagagagaggacaaaattagaaaattaagtgttatattcgcaacgataaagaaacagagagtgcgtacagtaaaagcagtcatattatcgataatcgtatgtgtgctcatatcagaaagttgccaggcaatcccttctaacaaaaccgaagaaattcgcatgggcactactgaatatttgagtagtgattcatcatactttttagattcgttactttcgttgttattattcaacagcggagatttatctttagacgagtcgcattcgcaccttgacaaaaagactttattacgtttattcattctgttgaaatatacagcaacacattcaccggaacaagccggagactttctacaagcagattacactccagatttctgccaaaaacaaacaacccactacatttatcggttgcgaaaaatcattatttgattacccaacctcgcattttagttttagccttccacaggctgggtacaatttatctctgaatataaacagattaatatacatatcattatgaatctaaccttgatgattgtcgtgattcttacggctattgcattggtaggcatagcccttgggcttgcccgactgatttcccctcgttctttcaaccgccagaaaggagaagcttatgagtgcggaattccaacccgcggacgttcatggatgcaattcaaagcgggttattatttgtttgccatcctattcttgatgtttgatgtggaagcagtatttctgtttccctgggcagtgaccgtacaggatgtagggattgacggattgttgaatatacttttctttatggtcatcctaatattaggattaacctatgcctggaaaaagggagcattggaatggaaataaaagaataagctattttaatagagtgatatgaaaaagcctcaaataaaatcaatgaagtatgaggacttcaaagacaatgagtacctcgaacagttgcgggctaacgggacagacatcatcgtaggctgtctggacgacctgattgactggggacgctctaattctgtatggcctcttacctttgctacgagttgctgcggtatcgaattcatgtcggtaggtgccgcccgttatgactttgcccgctttgggtttgaagttgcacgtgccagcccccgtcaagctgacgttatcattgtagcaggtactatcgtacataaaatggctccggtattaaagcgtttatatgatcaaatggcagaaccaaaatatgttattgctatgggaggatgtgccatttccggaggacctttcaaaaattcctaccatgttgtaaagggagtgaaccagattttacctgtagatgtatatgttcccggctgtcccccacgtccggaatctctattatacggcatgatgcaactgcaaagaaaaatcaaagtggaaaaattcctaggaggagtcaataaacaggaggacaaaccaaacattaatgagtattaaaagatgaaagacaagatattaaacatcgccccccatgccacctttttggaaggacaaaccttaacggtctgccttcccaaggagacattccacgagacagccttacgtctgcgccatgacaaagagttacaatttgactttctggtgtgcatgacaggcatggactggggagaaacgttaggagtcatgtaccgtctgcgttccacccaactagggcacgaaatcgacttgcgagtagagacacccaatagaactaatccggaactaccgacggtatcagatatttgggcaacagcaaacttaaacgaacgcgaggtattcggattactcggtatccgttttatcaaccatcccgacatgcgtaaactttttctacgcaatgattgggtgggctacccattgcgcaaagactacaacacagacccggaaatcaatcccgtacgtttagagagcgaaagcaatgaagatgccgcacctacactaaagatgacagaatcaggggaaatccaagaaaaagaaaatgtcattttcgaggatgacgaatatgtggtaaatatcggtccccaacacccggcaacccatggagtactccgattccgtgtagccttggaaggtgaaattgtaaaaaaagtagatatcaactgtggatatatacaccgaggaatagaaaaactatgtgaaagcatgacttatccacagactcttgccatgaccgaccgtctggactatctatctgcacacatgaaccgccacgcactttgtatgtgcatagaagaagctatgggtattgaagttccggaacgagccaaatacatccgcacaatcatggatgagctgacgcgtatagcttcgcacctgttattctggtcgaccttctgtatggactttggagcgttaagtgcctttttctatggattccgtgaccgtgaaaaaatattggacatgtttgaagagacctgtggcgggcgtctgattcaaaactacaattgcatcggtggagtaatggcagatatccatcccaatttaataggccgtatcaaggattttatcaaatacatgcctaaaatgctgaaagaataccacggagtattcaccggcaatgtcattgctcaacaacgtatgaaaaacatcggtatactctccttgaaagatgctatttcttacggagttaccggtcctgccgggcgagcttccggttggagttgtgatgtgcgtaaactacacccttacggagtatatgataaagtggattttaaagaaatcctttatgacaaaggagatacctttaatcgctatatggtgcgtatggatgaaatcatagaatcactccatattttagagcaattggttgataacatcccggcaggagactatgcggtaaagaccaaacctatcatcaaattaccggaaggtcaatatttcaaaagcgtcgaagcagctcgcggtgaatttggcgtatttatagaaagtcacggagataaaaatccctaccgtgtcaaattccgttcaccgggtttaaccttagtatcagttgtagatttattggcaagccacaataagattgccgacctgattgcaataggtgcatcgcttgactatgtagtaccagacattgatagataaaaaataataaacagtaataacagtaaacaatatgtttgattttgcagttgtaacacattgggttgatgaaaccctacgcaatatcctaccggactcgtgggttaccactacggaattcgttcttgtcgggatctgcctgcttatcgcttatgctgtgatggctcttggattgatttatgcagaacgtaaagtgtgtgcctatttccaatgccgtttaggtccgaaccgtgtgggcccattcggtatggtacagacggtaaccgatatgattaaaatgttgataaaagaaattatagagataaaccatgtcgaccgtttcctattcaatttggctccctatgttgtaattatagcctccttgttggccttcagttgtataccctttgccaaaggtttggaaattctggatttcaatgtcggaatcttctttttgatagccgtatcatccattggaatcgtcggaatcctactcgccggatgggccagcaacaataaatactctctgattggagctatgcgaagcggtgcacaaatgattagctatgaattatctatcggcttgtctatattgacaatggtagtactcaccggtagcatgcaattatccaccattgttgaaagtcaggcagacggctggtttatttttaaaggacatattccggctttcatcgcttttgtcatctacctgattgcaggaacagcagaaaccaaccgtggtcccttcgaccttcctgaagccgaatcagaattgacagcaggttaccacacagaatattccggaatgcatttcggattcttttacgtagccgaatttgttaatatgttcattgtggcatctgttgcaacgacattattctggggcggttggatgccattacatataccaggctgggaatccttcaacatggtaatggattacatacctccaatattatggttcttgggcaaaagtgccataatggtatttatcatcatgtggtttaaatggactttcccccgtttacgtatcgaccaattattgacactggaatggaaatacctgttgccgatcaatctatgcaacctattcttgatggtatttgtcgtagtattcaaattacatttttaagcctttgaattatgagaagtacacaacaatatttcaacgatttcttcacaggtttgggttctttgttaaaaggaatgcgcatcacccttggagaattctttacaaaaaaagtaacagagtgttatccggaaaatcgtgccaccttaaaaatgttcgatcgtttccgtggagacctgacaatgattcacaatgaaaacaacgaacaccgctgtgtagcctgcggtatatgcgaaatgaactgtcccaacggcacaatccatgtggaatcacgcatggaagaaacagaagacggtaaaaagaaaaaggtattggtgcgctatatatatgatcatggcagttgcatctattgccaactatgcgtaaaaaattgtcctcatcatgccattgaatttgtaccgacatttgaacacgcagtattcactcgagaaaaactaatagaacaattaaaccggccaggttctaaacttgccgaaaagtaataaaatttagtattatggaaatgactttacccaaagtggtctttttatttctggcaacggtaattgttgtcttttcaatactgactgtcaccacaaaaagaatcctacgctcagcaacttatctgctatttgtattgtttgccacagccggaatctattttgagctaaactactcctttttaggagctgtacaattgacagtatatgccggaggtatcattgtcttgtatgtattctcaatccttctgaccagttctgacaatcagaaagtcgaaaaaatcaaaaggagcaaatactttgcaggcattatatccgcaggtgcaggtgcagccatctgtatttttatcaccttaacccattcattccctgtatcacatttcactccgggagaactgaaccaaaaggtgcttgggactgcgttgatgggaatggacaaataccaatatcttcttccatttgaggctatcagcgttttgctgttggcctgtatcattggaggtatcttaattgcacgtaaacgttaatgatttgaagctatggaaataacaatggaatattatctgatcatcagcactatcatgttttttgcaggcatctatggttttatcacccgccgcaacatgctggctgttttgatttccatcgagttaattttaaactctgtggatataaatttcgtggcattcaaccgtttcctatatccagagcagatggaaggactttttttcacgctattcgccatcggtatttctgcctgtgaaacggctgtggctattgccatcattatcaatgtatatcggaatgttcgcaacattcaggtgaagaatctcaacaaactacaagattaagactatggaatatacaatattaattctcgtactgccgctactcacatttttggggctcggactattcggtatgaaactacgcccgacagtggctggttgtatcggctcgctttctcttgcagcgataacgttgctttcctatctgacagcaggaatatatttcacatcgccccgagttaatggtgtatttgaaaaatggctaccatataatttcgaatggctgcattttaccgataaattacagattgatctcggaatactgctcgatcccatctccgtcatgatgttagtagtaatcactactgtatcattaatggtacatatttatagccttggctatatgaaaggagaacgcggatttcaacgttattatgctttcctgtcactttttaccttctcgatgttaggtttggtggtggcacccaacatcttccaaatgtatatcttttgggaattggtaggtgtttcatcttatcttctcatcggtttctactacacaaaaccagaagccattgcagcttccaagaaagcatttattgttactcgttttgcagaccttggctttttactaggaattctcctgctatcctattttacaggaacatttgactttggagtcctcacttccggaaattcatccgtattcgccaatgctgccggagtaacctttatgggcgcctctgttatgagctgggccttggctcttatttttattggaggtgcaggaaaatctgcgatgtttcccttgcacatatggttacctgatgctatggaaggaccgactcctgtatccgcattaatccatgcagcaacaatggttgtagccggagtttttttggttgccaggctttttcctctatatattttagcagcaccggaagtattagtcggcatcgcctatgttggagcttttacatcattatatgcagcagtcgtagcatgtgtacaaacagacattaaacgtgtgcttgcattctctacaatctctcaaatcggttttatgatggttgctttaggtgtatccggaatgggaggacacgcaggaaccggatatatggcatccatgttccacttatttacacatgccatgttcaaagcattactgttcttatgtgctggagccatcattcatactataggcagtaatgaaatgagcaaaatgggaggattacgaaaatatatgccattcacgcatttaactttcttaatcgcctgtctggcaattgccggtatacctccattttcaggttttttcagtaaagatgaaattttagctgccaccttcgcctttgctccacaatttggggtatttatgagttttgttgccggactgacagctttctacatgttcagattatattataatattttctggggaacgccagccaactatgaacatacccctcacgaggctcctaaaaccatgacaatacctttaatgattttagctgccattacactagttgccggattcataccctttggccaatttgtcagcagtgacggacaaccatatacaattcatttgaatatgtctgttgctatctccagtgtggttgttgctttattagccatcggaattgccaccttcttttataagtcggcatgtgatattccagagcgtttactaaatatgttccctcatatgcacaaaacggcttaccaccgtttctatatggatgagttctatctgtttatcacgaaacgtatcatattcaactgtgtttcacgcccattagcgtggtttgaccgccatatcattgatggagcattaaatgggatggccaatgttacgcagcgcgtttcttatgccatacgtggtttacaatccggacagattcaacaatatgcatttgtatttctgttaggaacattattaattgtattattagtcgtattcttataagaatagatagtaattttaaatatagtaattatgaattttctatcattatttgtcctgatacccgtcttaatgctgtgcggattaatattatcaggaaatatgaaacaaatacgctgggtatgtgctacaggagcctcgcttctactcgctctggcagcaatcctaacctttatgtatttgggtgaaagaaatgcaggaaatacagcacccatgctgtttactgcatcttcagtatggtatgcccctctcaatatacactattctgtgggtgttgacggcatctcagtagccatgctgctattatctgctattattgtattcaccggtatttttgcatcttggaaaatggaactcatgcctaaagaatacttcatgtggttctgtttgttaagtataggagtgtttggtttcttcatatctacagatcttttcaccatgttcatgttctatgaaatagccttgatacctatgtatctattaattggtatatggggtacaggtaaaaaagaatatgcagccatgaaattaaccctgatgcttatgggtggctcagcacttcttctcgttagtatcctaggcatttacttttcgtcaggagcctctagcatgaatatattggaaattgcgcaacaacaaattccagaacctttgcaacgctggtttttcccgctttctttcattggatttggagtattgggagccttatttccttttcatacatggagcccagacggacacgcatcagcccccaccgctgtgtctatgttacatgccggagttttaatgaaattaggaggatacggatgtttcagagttgctatttccctaatgccagaagctgctcaggaattatcttggatattcttactgctaacaggcatcagtgttgtatatggagcttattcagctatcgtacaaacggatttgaaatatatcaatgcatactcgtccgtaagtcactgtggcttggtactatttgctatccttatgctcaatcagacggctatgactggtgctatcatgcaaatgttaagccatggattgatgacagcgttattctttgccttaatcggtatgatatatggacgcacacacacacgtgatattcgagagatgggaggtttaatgaaaatcatgccattcctagcagtctgctacgtaatcgctggtttagcatccttaggtctacctggattaagcggtttcgttgcagagatgaccatatttgtaggatcattccaacatgccgatacattccatcgtgtaatgaccattattgcttgtacttccatcgtcattaccgcagtatatatcctacgagtggtaggaaaactactttatggatcggttgtcaatgaacaccatcgcgaattgactgacgcagtatggtacgaacgttttgctgtcattatattaattattgctattgccggtatcggcttggcaccactatgggtatctgacatgatacataacagcattgaaaatctatggcctttttaaaaatcagttaactataaatatcaaaaatatgggttactccaattttctatttctaaaagaagaactatcgttgatagcagtaatgattatattactggtttatgatttgttcggttcgaagaaaagtttaaactattttcatccagtggcttgcatattatttctagcccataccctattcaacttctttccaacagaaagcatagaagcttttggcggaatgtacgtagataatccaatgggtgatatcgtaaaaaccattttaaatgtaggcaccttattaatcctaatgcaagcaaataattgggttaatagtgatagcatgcttatccgccgaggagagttttatatcattcttttcacatccttgcttggtatgtatttcatgatttcagcaggcaatttcctcttattctttatcggattagaaacagcctctattcctatggcgttactttcagcctatgacaaatacaaacacgaatcggctgaagctggagccaaatatatactctcagcaacatttgcatccggactttcattatatggtatttcgttaatctacgggactgtaggaacactctattttgcagatcttcctgcaggtattgacggaagccccttacaacttatggcattcggattctttgttgtaggattgtttttcaagatatcccttgtaccattccaccaatggacggcagatgtataccaaggggctcctacaagtgtcacagcttacttctctgtaatatccaaaggtgctggagcttttgtattaatgactattctttgcaaaatctttggtaatttgattacagaatggcaatccgttttgcatgttatcatcatagcaaccatcactattgccaatttatttgcaattcgccaacaaaacctaaaacgctttttggcctactcatctatctcccaagccggctatatcatgctgggtgtcattagtggaagttctatggggatgacatcattagtatactatattttagtttatatggtatcaaatctagctgcattcggtgttatcggaataattgaacaacgcaccggtaaattgacaatcaatgattacaatggcctatattcaacaaatccacgattaagctttgtaatgatgcttgctctgttttcattggcaggaatacctccatttgcaggtttcttcagtaaatttttcatatttgcagcagcagcacaacaagggttttacgtattggtatttatagcattactaaatactatcatttcattgtattactatttactagtagtaaaagctatgtttatcaacaaaaatgacaatccgatacaacccatacaatctgacatttacactcgcatcagcctcattgcctgctccgcaggtgttattgcaataggattgattagtgcaatttatgagaatattgaggtattcagttttggagtataaatttcattttttaattttgtagtgtaaaagaatttttattacataaaaacattatattatgaagaaagttatcaattcaccgaaggcaccgaaagcaatcggtccttacagccaggctatcgaagcaaacggaaccctttatatcagcggacaacttcctgttgacgtaaataccggtaaatttgttgaaggcggcatcaaagaacaaacagaacaatctctgaaaaatatcggttatatattagaagaagccggtttaacttatgcaaatgtagttaaaacaacttgtttgttgagcgacattgcaaactttgctgcaatgaacgaagtatatgcaaaatatttcacaggagaatgtcctgcccgtgcagcttttgctgtaaaagacctacccctgggagcattggttgaaatcgaagttgttgcagttaaataaacattgactttgcaactgattaaaataaataggggcgacataatttgatatgcagttcattcaattaaaagtcgcccctatttttatttattcatatgaatttaaaaagaatatagtctttccgcatccattccagaaattcatataattatttctttttcaaatgatccaaaataccttgcattcttttggctgtcccggaatacttgcaatttgcaatcacagtttcgcatatttttatccaacgatttaattgagccggagtcacattatctttcactcgataagcaagactaagagggaattgctcgctaggaataatttttacacctttctctgctgctaataacaactgattctgattaccaccccaaaaagctcttgctatagcagttttagccaacaatactttatcattagtcaatttcaaagcaacaatttcttttttcagacgatcaatactgtcaactttaatactacccggacgagcatttatcaccttatccaagcgagcattatataatttgataaaatgttgttcaacaacctcttctcctaaactcttaacaaacttatctcggttattcaataaataattgtaagtagctgatccagcaggtgcaagactcgcattagtatataagaaccaataatcttctgacactttttcttcgtcattcaagcgttggaataattcattagctacaacatcagcattttttccataagtagcaacaagcatctgaacataatttgctaaaaatgccggctctcgattacctgatttatattttgcctccaatactcctgttgctttattttcatcaaaagcttcttctactctctttataaactggtctggttctccacctccaacgattttatgacgaacatttccattcatatcaatcaacaagaatgtcggatacgctgctactccaaaacgttttgccaattcaggaccttctcctttctccatgtcgtattttacacaaatgaaacgattgagataatcacccattttttcctgcggaaatatttttgaagtcatatatttgcaaggtccgcaccatgaagtatagcaatctacaaataccatctgacggttcaatttcgctttttccaatgcttgttcaaaagtcaaatcctcaaaatatacaccgacatgagcctttttcttcaaaatgtctattactgtaaccaagtacctcttttggtcaccatcttcaactttggcattcagtttttcagcgacagtcaacatacggctatacatttcttttgtcattttctctttcaaagaatattgagcaataaagaaatttacgaaatcgtcaatcaccatggattcagcctgttcttccatcaattcaacaactttatccgcatttttttcttgtacaagcccggcaattacacatgcattcaataatcgatctttctgtgcaatctgtaatccttctatctcttttttcaatgtagcaacatcaggagtatttttcagagtcaatccagaaatataacgaactaatacgtttgaatagttatcaaaaataaatttatcgactttctctttaccaacattcttagcaagtgccggataattagccaaaataaaattgaaatcgtcacttcccggagtacaattccccatttcaaacaacgaccaaaattctgcttttaccctatctttcttagacattttttctttcaactcacccagaaccttctcagccattttgctgtcataagcatcgttcaatactcgataataaacggctaattctgctttcttcatttttccggaattatatctttcagtcaaataaagaagattggttttttcattcaatcctaattgtactctctcaataaaatcatctaaatcccccccgccaacaatccgatgctgaacggttccatcaggacgcacaattacaaatgtaggataagcaggaacacctaattttgttactaattcttttccttctcccttctccatatcaaacttcacacaaacaaaacgaggattgaaaaactctcccgcttttgcttgaggaaatacaacttcagtcatgtgtttacacgggccacaccatgtcgtgtaacaatcaacaaacacaagtttattttttgcttttgccttttttaaggcttcagaataagttaggtgctggaagtctacgcctccttgtgcaaataagtaagagcagattaataaactactcaataaagcaaataattttttcatcatgtttttttttaattagtggcagcaagttataaaataatgacacgaccctacccttctcatttgcggattaacttatatttatgagaaataaatgcatatatttccatttttaaacataccatcgtaaatatcatccattatatttaaatttgcgcgaaacataccaatgatacaccatgactgaaaaattccatcactttaaagaaacaataaacaatatccctcttccggaacaattcacctgtcctttccactacactccacacccattatgtgaaatggcagctcaagaagtacaacattacatacaaactcaaacagaatggcaacaggaactacaaaaaggaaaaatgtttggagttctaattgtacgcgccacagatggcaatatcggctttttagctgctttctccggcttattggcaggacataacatccacgactattttgtcccgccaatctatgatttacaacatcccaatggtttttttcacatagaagaggctcatatatccaacattaatacaactatcaataaactggaaacagccccacaatacctggaatacaaaaaaacattacaagaagagcaacaaattgtggctttagctatcgggactgcaaaaatgcaaattcaaaaagacaaattggcaagagatataaaacggaaacagcaactttctactgaagaagaagcagccttaatacgcgaaagccaacaccaaaaagctgaattaaaacggataaaagaacatcatgcccggcaaatcgccagaattcaagcgtatattgaccaatggcaaaaacaaattgattcattaaaaaatgagcggaaacaacgttcggcaacgttacaacgaaaattatttacccaattcaaaatacataattttttaggcgaagtaaaagatctctacgaactatttaaagaaaaagataacagcattcccccagcaggagcaggagaatgtgctgcacctcgcctgctacaatatgcaatcttacatgaattacatccgattgccatggccgaattttggtggggagactcgccacgtacagaattacgccgacacggatattattatcccgcctgcaaaagcaaatgtgaaccgattttacaatttatgctccaaggtctaaacgttgaggataatcctctacagaaaataatcaaggaacttgaacctgagattgtatgggaagatgcatggattgttgtaatctataaaccagcagggatgttgtctgtacccggtaagtctgatttaccaactgtaacaaaatggcttcaaacacaatatccgacagctagtggtcccctacttgtccatcggctagatatggctacatcaggactgctactggcagcaaaaaacaaagaagtccatgccttgctacaaaaacaatttcaacttcgagaaataaaaaaacgctatatagctttattagatggaataatttcatccgccaacggaacagtcaatttacccctatgtatagacccggacgaccgtcctcgtcaacttgttgattttaaacatggaaaaccagcaattactcactatcacgtcatttctcaagaaaacaacatcacccgaatcgcattctatcccattacaggtcgcacccaccaacttcgtgtgcatgccgctcatccgctaggtcttaacacacctattataggcgatgaactatatgggaaaaaagccgacagattgttcttacatgccgaagccattgaatttatacatcccattacaaatgaaaaaatacacatagaaaaaaaagctgatttctaacaagaaatacaacctttcatttttctgatcgtataaatcaaaactatatcactatagaaaaaaaatatttgcattataaatgtacaatgagtaattttgaaacatacaaaatttaattacatacaataaatctaatctaaaacgttatgagtattaaaggcacaaaaaccgaacagaacctgctaaaatcatttgcaggagaatcacaagcaagaacgcgatacacttttttcgccagtgcagcaaaaaaagaaggctatgagcaaatctctgctgtttttatggaaacagcagaacaagaaaaagaacacgcaaaaaaattctttaaatacctggaaggtggtatggttgaaatcacagccaattaccctgccggcatcatcagtacaacagcagaaaatcttaaagctgcagcagagggagaaaatgaggaatggcatctgttatatcccgaatttgcaaaaattgctgatgaagaaggctttcctcaaatcgccaatacgttccgtcaaattgccaaagtagaagctgaacatgaaaaacgctaccgcattctattagagcgagtagaagctggtaaggtattcgaacgcgacgaagaaattgaatggcaatgccgaaattgcggatatatatttaaaggaaaaaaagccccgatgaaatgtccggcatgcgaacatccgcaagcatatttcgaacccaaaaagaacaattattaattcataagaaactactacatgcaaagaggttggaattgatatttgattccaacctctttatctatccatgaaacaccaacgtttgcaattttactgatttataaaaaaaagagcccttaaaaggctcttttcttatttatttcccgtaaatttggcggctgtgcaagctaatttattaaatctaatataaaaattatgacacaaaaaattcaacaaacgctgcgcgattcagccggtatgcgctggacggtgttgctattcctagcttttgctatgttttgttcatatatctttatggacattctttctcctatcaaggacttaatgcaatccactcgcggatgggactctaccgcattcggaactatgcaaggttctgaaactttcttgaatgtattcgtattcttcttgatttttgctggaatcatcctcgacaaaatgggagtacgctttacagctattctttcaggagctgtaatgttagtaggtgccagcatcaactggtatgcagtaacagaaggtttccaaggaagcggtttggaacaatggttcaataacaacttgaactatattcccggttttgatgaattaggaatttctcctttctacaaggggatgccagcatctgccaaattcgcagcaatcggttttatgatttttggctgcggtgttgaaatggcaggtatcacagtttcccgtggtattgtaaaatggtttaaaggccgtgaaatggcattggctatgggctctgaaatggcgcttgcacgtttgggtgttgcaacttgtatgattttttctccgatgtttgctaaattaggtggagtcattgatgtatctcgttctgtggcattcggtgttattttgttattgattgcattaatcatgttcattgtttatttcttcatggataaaaaattggacgaacagaccggtgaagcagaagaaaaagatgatccatttaaaatcagtgaccttggttccatcctttcaagtagcggattctggttggtagcattgctttgtgtcctttattactctgccatcttccccttccaaaaatatgcagtgaacatgttgcagtgtaatttggtatttactgaagttccggcagattcattctgggcaaccaatacagttacagtcatacagtattgtatcatgctgattgtagcagctgctgcatttgccagcaacttctctaaaaacaaaagcatgaaatacggaatgctgattcttgcctctgcagccttagtagtattctgctacatgggatatatgcgtcagagcgcagaaactgtatttgcagttttcccattattagctgtaggtattactccgattttaggaaactatgtagaccacaaaggtaaagctgcaaccatgctcgttgtcggttctgtactgcttatcctttgccacttgacatttgcatttgtactgccggcattcaaagacaatgctattggcggtatcattatcgcttatttgactatcttggtattgggagccagcttctcattggtaccggcatcattatggcccagtgttcctaaattagttgaccccaaaatcatcggtagtgcatatgcccttatcttctggattcagaatattggtttatggttattcccgctattaattggtaaagtacttgacaaaaccaatcctcagctcgttgcagacttgcaaaatggcctgattacaccggaagaggctgctgtttcatacaactatacagctccgcttgtaatgctcgcttgcttaggtgttgcagcattggtattgggctttgtcctgaaggctgttgacaagaaaaaaggtctgggccttgaacttcctaatattcaagactaattttaataatactgtatcaggaatcacagtgattcctggtacagtcttttttaataaatatatctctatgacgcatttcttttttttttctactaacaatgattagctgggcaacaccagcaagtaacacaacttctacactacaacaaaaacaacacaacccttgggaaaacgaaaccttttttgccgagaacaaagaaaaaggacattccacattcattccttaccgcacagaagccgacatgctggctgatgggcaattttacaaaacaccctggacaacccctttaagttcagattatttacttttgaatggtatctggaaatttcattttgttccggaaccgtcacaacgccccatccaattttacaaagacgactttgacatttcatcttgggattctattccggttccatccaattgggaaatgcaaggatacgaccgtcccatctacgccaatgtagaatacccccatgacaacaagcccccctacattcaggcccgtcctggatttaatgacggaggcaagaactacggcatcaatccagtcgggtcatacgttcgtttttttgacctgcctgccaactggcaaaatcgccgtgtatttatccattttggaggaatttacagtgctgccaagatataccttaacggccattacattggctatacacaaggctccaataacgatgcagaatttgatttgacaaaatacctacgcgaaaaaaacaatcgtttggcagtacaagtattccgttggtctgacggatcatatctcgaatgtcaggatatgttccgcatgagcggaatcttccgggatgtctatctttacaacacccctttggctgcagttcgcgatcactatataacaaccgatttgcaagaaaaagacaattggcaatcaggacagatgaatatccaattgacatttgacaatcgctcacatctgaagggaaaacgcaatgtaaaagttcaacttatctctccagaaggtaaaaatattgcaacccaagagacagaaatcacttttacgacaaaagatagcttactggaaaaaacagtaaccattcctcttaacaatctccaattgtggacagcagaaacgccaacactctacactgtacacatcacccaaagtgacaatggtcgggaagaaatggctttttccacgaaatacggattccgaaacatacaaataaaaggctcacttgtctacattaacggcaaacgagtattcttcaagggagtcaatcgccacgatacccaccctctatatggccgtgctgtgccgacagaatccatgctacaggatattttactcatgaaacgcaataacatcaatacaatacgcacatcacactatcccaacgcttcaaaaatgtacgccatgtttgattactacggattatatgttgtagatgaagcggatctggaagaccacgcaaaccaatccatcagtaatatgccttcttggattcctgcatttgtcgaccgggttgacagaatgattcttcgcgacagaaatcatccttctgttattttctggagtttgggaaatgaagccggagaaggagaaaacatgggagcctgctatcaagctgcaaaacaattagacaaccgtcctatccattacgaaggaacctattgcggcacgcaggttggtggagtacgctttagcgacctgcattccaaaatgtacccgggcatcaaatgggtaaacgaccatgtaaactctgtgaaaaagccactcttcatctgcgaatatacccatgctatgggaaatgctatcggtaacttgaaggaatattggaatgcgatagaagcaagtagtgcatgtatcggtggtgctatctgggactggactgatcaagccatatacgaaccacacgaaatcaaaaaaggcatttataatcttcacacaggttatgatttccccggtcctcaccagggtaacttctgctcaaacggtattgtccctgccactcgggaagcctctcccaaactggctgaagtaaaagctgtttaccaatatttggatttccgtttaaattccaatgacttacaacaacgtaaggcagaagtatctctacgcaataaatacaactttctctcgcttgacaaattctatctgcaatggcaaaccgtaatcaacggacatatcgttgctacagatagcatgccattgcctgcaactcaaccagcagattcagctgttctttccttgcaactttctttccatgaccgcatacagaaaaacgacgaaattgcgctcaatttatctgtaaagacagcagacaacaattgctgggttgataaagcacacacagtagctacagcacagtatatcctgcaaaatagagaccaccttcctgcttggacatacgagcgcaacaaagctctgaaagtaacctctacagacagtctttacaccattgccaatccaaacatcgaagctgttttttcacgtacgacaggacaactctgcaaactgaacatcaaaggcaaagaaatcattgcacaaggacaaggattcttatacgacaatcacagatggatagaaaatgaccggttccaaaataccgccaacggacttgaagcgacaggtacctgcattattgaaaagcaaaaaggtatcgtaacggtctccaccactcgccaaggctcgctctgttccacagaaataacctacacgatttatcctgacggagtattggacataaatgcagcgtttaatccgcaaacagcagacttgcgtcgttgtggtcttgtctgcggaatcaatccaaccttctgcaatgttgattattacgcttacggacctatggaaaattataacgaccgcaaagaaggcagcacactcggcagatacaccactactgtaaaggatatggtggaacaatatgtcaaaccacaatccatgggcaaccgcgaaggtttaagagaattaaaattaaccgatgccaacggctccggagtacaaatccaaacagaaggcaacgtatctttctcggccctcccatacacagatcaggacttaatggaaagcaaacacctttgggaactggataaacactggaaacgcccttacacagttcttcatttggatgcagctcatcgtggagtaggaaatgcaagttgcggacaagatgtagaaaccttaccgcaatatcgtattccacaagaaaaactaagctataaattaagaatcactacattataaacccacatgaatagaatatatccattaatcggtgtcacagcactatcagccttggctagctcctgtcattctgacaaaaagaaaaatacagaacgatataatatcgtctacatcatgacagacgaccacacgatgcaaatgatgagttgctatgacaaccgctatgttgaaacccccaatattgaccgcattgcagcagatggcatccgtttcaccaacagttttgtagccaactctatcagtggtcctagccgtgcttgcatgattacaggcaaacacagtcatgcaaacggctttattgacaattcgaccagcagatttgacggcagtcagcagacgatgcctaaattattacaacaggccggatatcaaactgcgatgattggtaaatggcacttaggcagcattcctaccggttttgatttctgggaaattcttcccggacagggcgattattataatccgaccttcatcaaaatggacacaacaaaagttacggaggatggctacctgaccaacatcatcaccgataaaagcatccgctggctagaagaacaaagagatccaaacaaacccttctgtctctttgtccatcataaagcctgccaccgcaattggctgccggagctgaaatatctgtcgctctatgaagacaagactttcccactgcctgaaaacttctacgatacatacgaaggacgcaaagcagcggcagctcaagaaatgaacatctacgaagacatggatatcatgtacgacacaaagatgtacctgcccgaccgtccctctcggctaaaaggagcctacgaaagctttatcggccgtcttcatcctgaagaacgcgcacaatatgatgctttctatcaaccactcattgacacgttctatcaccgaaatcttcaaggtaaagaactggcagaatggaaataccaacgctatatgcgcgactatgccaaagtattaaaatccttcgatgacaacatcggtcgcctgctcgactatctcgaagaaaacgatatgatggacaacacccttattgtctatacctctgaccaagggttctatatgggagagcatggctggttcgacaaacggttcatgtacgaagaatccatgcgcaccccgctcatcatgcatctcccggcagagttcaaaaagcgaggagacatcccccagctagtacagaacattgactatgcccccaccttccttgaacttgccggagcacccgttcctcaagacatacaaggcgtatccctgctacccctgttaaaaggagaacaacccaaagaatggcgaaaatccttatactaccattattatgaatatccggcagaacacatggtaaaacgccattatggagtacgcacagaacgctacaaactcatccatttctataacgacatagacgaatgggaactgtatgacttgcagaacgaccctcatgaaatgaataacctctacggacaaaaaggttacgaaaccatcacggacagccttcgcacagaattaaagcgtctgcaacaacaatacaaagtccccgtagaatatataaattgaaaaacaaactacgatgaacagaataaccagattatttggaataaaataccccatcatctcaggcgggatggtatggtgcagcggctggcgcctagcttctgctgtcagtaataacgggggactaggacttttaggagccggttcgatgcacccggaaactcttgtcgagcacatccgaaaaatgaaaaatgccacagacaaaccttggggtgtcaatataccattgctctatccggaaatagacaaactcatgagcatattggtcgaagaaggtgtaaaaatcgttttcacctctgccgggagtcccaaaaaatggaccccctatttgaaatcacatggaatcacagtcgtccatgttgtcagcagtacagcctttgcctgcaaatgcgaagaagcaggctgtgatgccattgttgccgaaggctttgaagccggagggcacaatggtcgtgaagagaccaccacgctaacacttatcccccatgtggcaagccaatgcagcctgccactgattgcagcaggaggtatcgcatccggcaaagccatgctagccgccatgcaactgggcgctgaaggcgtgcaaatcggcagccgctttgcggttgccacagaatcctctgcacaccaacatttcaaagaactggtatggaacacacccgaaggcggcaccatgctggcattaaagaaaatagccccgacccgattaatcaaaaacgaattctataaccaagtcaaaacgttagaagataccggagccgatgtcgaccatttaaaagaactgctcggtaaaggacgtgccaaacagggaattttcgaaggcgatatgactaatggagaactggaaataggacaaattgcctccatgcttcatcaggaagagagcgttgctgacatcatccaagacatcataaaggaatacaacacctgtctccgaaattgtcagaatagtcccctactcccagaataacacattcaaaacaaacaaccgaatgatacaatttacccgtaccatattagacaacggcttgactgtcatctgcaacaatgacaaaagtaccccgttcgtatcggtcaacatcctatacaaagtgggttcacgtaatgaacagccggaaaagacaggttttgcacacctttttgaacacttgatgttcggtggttcgcaaaatatccccgactacgaccgacatgtacaggctgccggtggagacagtaatgcctacacgaccaatgatttgacaaactactacatcaccatccccgcagcgaatatagagacagccttatggttggaatccgaccgtatggcagctctcaacttctcccagcatgcactggacgtacagcgacaggtggtgattgaagaattcaaacagcgctatctcaacaacccgtatggagacctgtggctgaaactccgtccgctggcatacaaagtacacccctaccgctgggccacaatcggcatctcgcccgaacatattgagcgtgccagattggaagatgttgaagcctttttccaccgctattacgctccggacaatgcaattattgccatcagcggcaatatagaagaaaatcgtgccttagaacttgtaaccaaatggttcggtgacatccctccctcccgtgcaactccgctcgtcataccccaggaacccgtccagacagaggaaagacgtcttatatcagaagggaatgccgtgccggcagatgccatatacaaagttttccacatgggaaaaagagacagcgataatttctatgcctgcgacatcatttcagacatattgtccaatggccaatcagcccgcctctatgtcaacctgataaaaaacagccgcctgttttccggtattgatgcctatatcaccggagacatggatcccggactgttcattttcagcggcaaactatcagagggaacagatattcggcaggcagaggctgccattgactccgaaatagaaaaattcatccgggattccatcacagaacgcgaacttcaaaaggttatcaacaaaaccgaagcccgcatctcgtatagcgaaatcaactatcaaaacaaagcctgcaatctggctttctttgaatttctgggtgatatcaatctcatcaattctgaatgttcccgttataacaacataaacatcgaacaaatcagagagaccgccaaagacatattccggcgcgaaaacagctctactctctattacctgaaacagcaataacctaagaattccaatcatgataaaaagagatatagcccctgctttaacacctctattcgagcccaatcttttgccttaccgacgattctccttggacaacggcattgaagtggtgtacattcacgacccctcacaggaagtgttcaaaatagatgtcgtctttgaagccggaatatattaccagacacaacctctggttgcctccaccgctatcaacatgctcaacgaaggcacctcccggcacacggcagaagaaatagccgatttatttgatttttatggagcctatacagactttaattgcggacttaacaaatccgagttaagcctgatatccctcacgaaatatgcctcccaaactatcggcatgttggcagaactattgcttgacagcattattcccgaaaaagaattggacatattccttaccaacaaacgtcaggagtttctggtcaatcaggaaaagacctcctacatggcaagaaaaaaattctccgaggtatttttcggcagtagtcatccctactcaaatattgtcagagacagcgattttctcaacgtcacccggacattggtacaggatttctaccgacaacacatccatgcgcaaaattgccgtatcatgatatgcggcaatgtcaacgaacaggtgttgcaaactgtttccgaacaattcggacaattgagcaaaccttccgtttccatagcagacccgacacgcccctttgctccagagccaaccggacgttaccatgtcactaaatccaatgccatgcaaaccagcatccgcatcggcaaatcaggagtccgtttgctggaagaagattatgccggatacatgctgctgaacaccattttgggaggatacttcggttcgcggctcatgtcaaacatccgcgaagacaaaggttatacatacggcatcaattctttcaatgtatccatgccgcaaggcagctattggtgcattgccgcagatgtaaacaacgaattcacagatgccaccatagaggaaaccttcaaggaaatcaaccgtctgaaacaggagcctgtaggcagtgaagaaatggaacttgtaaaaaatttcctacatggcgatctactacgcgaacttgatggcgtattctcccaatcagatgcactcaagcacaaactcaattatgctacagacaaccgcatctatattgacctgattcaccgaatcacaagatgcaccgcagacgaacttctccgtctcgcaaacaaatactggaagacagaagaaatgtatattgtcactgcagggaaatgattccccgcagtggctagcttttaatataaccgttccacctccataaaagaagcatcaaaccaagccggacggtaaatatcttcaatataacgcttaggcaagaccaacgaaagaatattctctcgtgattgataacggtagttttccccttcattgatacggtcagcgggataaatagtccgttgcaggcaaggggcatccagacatgtaaaaaaacgacggctcgccacatcgatatacaaacgctcgttcaaagctatgcctaatcgtaatttcacaccttcttgctctgtatgttcttttacgacacaccattccaatttaatccgcttgggaatattgaaataggtgcggaaaaacttaaatgaattatattctttggtttccatacttcacatttatacaacacaaaaatagtataaatatcaatttacagaaccaaaacaaaagaagaaacataccatgttcgggcatatcaaggattagtcagattaaatcactatttttgtaaaaaataaccataaaattttttctaatatgctagcatttattatttggctgattggcactatcttaggtattaaagccattctcgaaattctgaacatgaaaggcgacacagtaaaaaaattacttttcatcattttgctgttaatgaccagttggataggattggctgtctactacttcttcgccagagaaaaaatgtcggaatggctgtaagcaacgaaccgacacgagataaaaaaacgaggctccctccaaagaagaagcctcgttttttatttaagcctaacggttattcgtaaaccacagtataagtgtaagtatttttctcactgcgcaacttcttacgctcgtcttttttgattgtgtattcataccccatatcaggatgaccaggctccctcaactcattccctacatggacttcataagaacgctcccacaactcatacgactcttcataccaaaactttgtcacaaacttgtctccgtcaaactcgtacttcataggcagcgcaatctcctcttccggccatttgatatatttctccttatatgtatacaccttattcggctctgaataattcggtataggctcaccccaaccaccaacctcactataatcgccaatctcaatcaggcaatccgaacccttgccgagcagacctatctgatataaaatctcgttaatgtcttcatccaaatcgaaaataaacgcattgaaatcaatgttggtgccgttagacggataacgcttgggataaagcacatttgcatcaaactcctgaatttccgtagaatcactactgtatctttcccaaaactctcctttagtcaacagaccgtccgtataataaaatttcgtataccaactatagccgtccttgtcgttttcttcccacaatttcgccagacggccgtctgcagtgtatcctatctgcgtatccacttcgtcataatcatcgctttccttgattctcaccacatttccctgctcgttcaaagtgaggaaatattgctcgtcactggaatcttcatgcttctgaccgtttccgtctacgtaataatattctctatggtggtccaccgtgatttctcccacaatgtggtaatcgaactgataggtatccgtctctctctcggtggctgacgcatctgccttcaccacaactcttgccacccgtccctgttcgtcataggaataggtataagtctgttcaaaatcattttcatgatttacctccttgtatccgtcaccataggtttctctatatgtaaccgactccactcttctcagcttcttgccatcctccttctctgctttctgtttgatggtgatggtaattaccgtatcgccgcagatgatgcgaatctctgccttacgggtcttgccggtgaaattctgtttcaatgtcagcgtaatcgtatagtcgcctgccttgtctccgctgtattggctcaatgccagccagtcaactgtcggagccactgccgcatccgctttggttgacacctctttcacttccgccttccacggaccctgggctgtgaacttgataccctcgttcttaccgcttttgtcgttggcataaaccacctgttcggtctgcgtgcccttatccagaacaatgccgccattaccgccgtcacctccgtcgttatcaccgtcggaacaagaccaactcaaggctcctgccagcaacagcgcacttacataataaaaaatctttttcattactattgaatttattgtttttttggtatattgcacaccatttatcatgcaaatacacatattcaaaaaaaaacatcaaaatagcaaaatattgtaaatacaagcctatttagacccattccatcacaatcacacactttcaatctttaacttaagaaagcctcgaaagccgttccttcaataattcgacgtatttttcctttaattcagcacttaggaaagagtgttgaatgacagtctcaaacttgggcaatagtttgatatacttacctatcagtcgttctacaatcacattctttatacccaatgtagatgctgatttaataaaatcctcccttttaagccttcttttccggccatttaaggttagcgccagttcttcatcatccttaggattgatgataaccgcatttagcaaatcataagcaggagtcaaacgtatcatatccgcaacctcgtacaaagagaagtttttcaagtgcatatcgttattccctgtcaaccaagaaaaaagtaccagctcgaagaaattagtgacatccattttaggtaaagacgagtattgcaaaacagccttgccgatacgttcataactactcttatatttatgctccgtctgcctttccgtcagctggcacatatcttccatcgcaatcttctctccggcaaaagttctgtcaattcgacgggtaagataacatagcgtatcatctgccatccgcatcagcgtatgaggcaccacttcaatatgtgccacctcagccaagtgcatggtcaaatcctcaacctcaggcatcatttcatattgcgaggtctgtggtttacaaatataaccgccccacaacccgacaatagtcaatcgtttgcaaccctcatgctcattcaaatgcaaagacaatttcggctgtacaccggtcaaagaagtttggtcttgaatgatttgcagagcaagccggtcaagttgctctgtcgtataatcaagagcaggcaatgctgctgtcccgaagaacttctttatgcaagccgggtgcatatccttttccccctttaagagcggacgataacaaaacaagcaattacacatggctttcctccttttcttccaaaggaataacgcttactgctccaatacaatccttacagcaggtcagcaacaacgacatccggtcaagaatactgatgtctgtattccgcaatgcaacatccaacaaccagccctcaggaatcaaaccatcgaaaaaagaaaataacacaggacttgtatatacttcatcttgtaagggcaatgtcaaactaactgcctttgccgtttttaaagaaaggtattccggcaaatagcggaactcatatcctgcatcgctttctgtcagaattcctgccaattggtctttatacaatatgcgggcttgtctcattgattactgttttttggagtggcaaccatttcataattgaagaaatcaagaagctgattcaccttatcaaggcgcagcgtttcctttccctgttcaaggtctcgcacaaaacgcaatcccactcccgacttcaacgaaagttcttcctgtgtcagattataccgcttccgcagcatcttaaccgtagttgaaagattattcatagtatcatactttataccttttcgggggcaaaatcaatataaatattcaatattataccataaagggtataattcattacattaccaaacctattatatcagataaggtataatatgaatccttaccccagataaaaaaaacgaggcttcctctttaacatatttcaaagtaccccttttttcttaccgaacaattcggagtgacttccgagccgaacgatttccaccatgtccaacacatcatctatccaaatcaatagaaaatcgttgccaacatgacattccatgcaacccttgtaattgcctatcaattcatgcggcttgtacttgcctggaacagcttctcctttcttcaatttgtccaagacatcaaacaaggcttccatcaatcggatattactgcgatattttttcaagtccttcttcgctttcgtactataatggattattctcattctatctcgtccaatgatttcataaatgcttcaaaactgcttgcgtctatcgtaccggcacttttgcccgaacgtgcttcctcaatggctgcctttgtctcctcgttcggctctgcgtacacgacatccctcaaaatgcactccacgaaattgttaaggcttctatgctcacgtttcgctgcacgctttaatgcatccaacaggtcgctgtccaacctgaatgctgtctgttttttaattaccgcttccatatttgttatatttttgattacaaatatacaacaaatatataacattccaagacaaataaaattaacgaggctccctccaaagaagaagcctcgttttttatttaagcctaacggttattcgtaaactacagtatagctgtaagtatttttctcactgcgcaataatttattataaattgtcttccttttgaactcataaggactattaggatcatctggattttcccgtacattccctacatgatcttcgtacttatgttcccacaactcatacgtgttggcatacgagaatccggtcacgaacttgtctccatcaaactcgtacttcataggcagcacaacctcttcttccggccatttgatatatttcttcgtgtattcatgcaccttattcggctctgtataaacaggcaccatcgtttcccagtcgctttcatcgttgtaaccgccaatctccatcaggcagtccgaacccttgccgagcagaccaatctgatataaaatcccgtcaatttcatcatccaactcgaaaacaaacgcattgaaatcaatattggtaccattagacggataacgattgggataaagctctgcaacatcaaactcctgtatctccgtagaatcactactgtatctttcccaaaactctcctttagtcaacagaccgtccgtataataaaatttcgtataccaactatagccgtccttgtcgttttcttcccacaatttcgccagacggccgtctgcggtatattctacccgtctatccacttcgtcataatcatcgctttcctcaattttcaccacatttccctgctcgttcaaagtgaggaaatatttctcatcactggaatcttcatgcttctgaccgctttggtctatataataagatgcatgatggtggtccaccgtgatttcacccacaatgttgtaatcgaaccgatagatatccgtctctttctctgtagctgacgcaacatcattcacctcaacccttgccacccgtccctgttcgtcataggaataggtataagtctgttcaaaatcattttcatgacttacctccttgtatccgtcaccataagtttctctatatgtaaccgactccactcttctcagcttcttgccatcctccttctctgctttctgttcgatggtgatggtaatcaccgtatcgccacagataatgcgaatctctgccttacgggtcttgccggtgaaattctgtttcaatgtcagcgtaatcgtatagtcgcctgccttgtctccgctgtattggctcaatgccagccagtcaactgtcggagctgctgccgcatccgctttggttgacacctctttcacttccgccttccacggaccctgggctgtgaacttgataccctcgttcttaccgcttttgtcgttggcataaaccacctgttcggtctgcgtgcccttatccagaacaatgccgcccttagcattaccgccgtcacctccgtcgttatcatcgtcggaacaagaccaactcaaggctcctgccagcaacagcgcacttacataataaaaaatctttttcatcactattgaatttattggtttttggtatattacacactatttaccatgcaaatatacaaattccaaaaacatcaaaaaaaaaaaaaaatagcaaaatattgtaaatacaagcctatttagacccattccacaagcatcactcacttcctatctttagtttaagaaagcctcgaaagccgttccttcaataattcgacgtatttttcctttaattcagcactaatgcaacctccaattggtctttatacaatatgcgggcttgtctcattgattactgttttttggagtggcaaccatttcataattgaagaaatcaagaagctgattcaccttatcaaggcgcagcgtttcctttccctgttcaaggtctcgcacaaaacgcaatcccactcccgacttcaacgaaagttcttcctgtgtcagattataccgcttccgcagcatcttaaccgtagttgaaagattattcatagtatcatactttataccttttcgggggcaaaattaatataaatattcaacattataccataaagggtataattcattgcatcaccaaccttattatatcagataaggtataatatgaatccttgccccggatacaaaaaaacgagactccctccaaagaagcctcgttttttttatttaagcctaacggttattcgtaaaccacagtataagtgtaagtttttttctcactgcgcaacttcttacgctcgtcttttttgattgtgtattcataccccatatcaggatgaccaggctccatcaactcattccctacatggtctgcgtacccttatccagaaatttctactcacaaaacgttctatatatggaacatttttagtacatttgcactgtgaatgatataagcaatgaaattgaaaactaaattcaaagtaaagctgtcaagtgaagcagacgcattccttaacactttgcgccaagacgttaaggataaaatcatctacaatgtagataaggtcgccaacggtcatgtagacaaggacttattcaaaaaattggaaaatacagacatttgggagtttcgcactcattataaaggtattcaatatcgtctgttagcattttgggacactgacgcagaaactctagttattgctacacatggatttgttaagaaaacgcaaaagacaccacacaaagaaataaataaagcagaggctattagaatattatatttcaactccaaaagtaaataatatggaaactatcacattttacactcttgatgaaatcaaggataaacatataggtaaagtaggtacaccacatagagacaattatgaaacagaattacaatcatttctaattggagaagccataaaaaaagcccgcaagtcccaaaatatgacccaagaggaattggctcaaaaaatcggagtccagcggtcgcaaatatccaagatagaaagcggacgcaacttaacactttccacaattgcacgggtatttaaggcaatgggcatgaaagcgtctttgagcatttccggtttaggaagcataactctttaacatatacatacaaaaaaacgaggctccctccaaagaagcctcgtttttttatttaagcctaacggttattcgtaaactacagtataagtgtaagtatttttctcactgcgcaacttcgtacgtttttcgtttttgatttcgtatttataccccctatcaggattaccaggatacatcaattcattccctacatggacttcataataatgctcccacaactcatacggctcttcataccaaaattttgtcacaaacttgtctccgtcaaactcgtacttcataggcagcgcaatctcttctcccggccatttgatatatttctccttgtgtgtatacaccttattcggctctgaataattcggtataggctcactccaatcaccatcctcactataatcgccaatctcaatcaggcaatccgaacccttgccgagcagaccaatctgatataaaatcccgtcaatttcatcatccaaatcgaaaataaacgcattgaaatcaatgttggtgctgttagacggataacgattgggataaaacacatttgcatcaatttcctgaatttcaacagaatcaccaccgtatctttcataaaattcaacctttgtcaataatccgtcagtataatagaatttatcataccaactatagccgcccttgtcgttttcttcccccaattttgccagacggccgtctgcggtatatccaatctgcgtatccccttcgtcataatcatcgctttccttgattctcaccacatttccctgctcgttcaaagtgaggaaatatttctcatcactttcagatccatgcccgtaataagatttagaattgtaatctaccgtgatttctcccacaatgtggtaatcaaaccgataggtactcgactccacctttgcacctgacacagcatcattctgcacaatgtcaactcttgccacccgtccctgttcgtcataggaataggtataaaccgattcaaattcattttcatagggatacacttccttatatccggcaccataggcatctttccatgtcaccgactttactcgtctcagcttcttgccatcctctttctctgctttctgttcgatggtgatggtaatcaccgtatcgccacagataatgcgaatctctgccttacgggtcttgccggtgaaattctgtttcaatgtcagcgtaatcgtatagtcgcctgccttgtctccgctgtattggctcaatgccagccaatcaaccgttggagctgcttccgcatccgctttggttgacacctctttcacttccgccttccacggtccctgggctgtgaacttgataccctcgttcttaccgcttttgtcgttggcataaaccacctgttcggtctgcgtgcccttatccagaacaatgccgcccttaccattaccgccgtcacctccgtcgttatcatcgtcggaacaagaccaactcaaggctcctgccagcaacagcgcacttacataataaaaaatctttttcatcactattgaatttattggtttttggtatattacacactaattaccatgcaaatatacaaattccaaaaacatcaaaaaaaaaaaaaaatagcaaaatattgtaaatacaagcctatttagacccattccacaagcataaggtattacataaacttaacggatataacaaaagatgtacacacgctttttgttacaacaatttatgtaattacattttatgtattatatttgtgcagaaaatcaaaaatagagcgttatggaaactccgtttatatttgggaaaattgctaccgataaaaatttcaccgatcgtgagaaggaaaccgcagacttagtccagaactttacatcactaataaatacaattatcatctcgccccgccgttggggcaagagttcgcttgtcaacaaggcttcaaaattggcaatggaacaggattgtcagttgcggatatgccacatcgatttgtttaatgtgcgcaatgaggaacatttctatgcattacttgcccaaaaggtaattgccgcgacatcatcaaaatgggaagaggcagtagaaagtgcaaaaagtttcttttcgcaacttgttccaaaaatttcgattggcacagacccgacaaacgaggtatctattgattttgattgggaatctgtaaaacagaatcctgatgaagtacttgaccttgccgaaaatattgcaaagaaaaagggtatcaaaattgttatttgcatcgatgagttccagaacatagccgaattctcaaacccggactatctccagaaaaagttacgctcgcactggcagcaacatcatcatgttgcttactgtctgtatggcagcaaacgccacatgatgatggaggtatttaccaacgcgtccaaaccattttacaaattcggaaatctgatattccttgataaaatcaacacaccttacctcgtaaagttctttgacaaccgcttctcagatacaggtaaaacgattgataaggatgcagccaacctgattgtagaacttgtagacaaccacccctattatgcacagcaactcgcacaacagtcatggttgagaacaaaagatgtgtgcacgactgaaattgtgcacgaagcacacactgcgttggtagagcaactaagcctgctgtttgcgactattacagaaacactgacaacccagcaactgaactacctgaaagctctcatcgcgggcgaaaaagcgataagttccacagaagtgatgcaccgctaccaaatttcttcgacaacctcaatagcacgttctaaagctgcccttatcaagaatgatgttttggatagcaaagccggggaaatctcgttccaagaccccatttatgcctattggttaaagacagaatactttgcaatataattacaaaaaacgagattccctccaaagaagaaacctcgttttttgtatttaagcataccggtaattcctgctcattcaaagcgggaatacatctttaaaatctgaaactcaaaaagaaacgcggaccttttgccgaaaacttcacatccatactctcttcttcatcccaatcaaagctcaagtcggtatctccccaacgctgctccactcccaacgaaatcacccgccaggaaacagaagccccgtaagtgaaataagtggcatatccgcccttaaactcatctgcataaataatggaataacacggcaacacccggaaatagagagccactttcaactcgtgcaccggattcaccgtcagggagggaccgaactgcatgcccacctcacctttatatacatcagacgccccgtcttcctcctcctcttcactataagagggcttttccactccgtccggatagtaatatccgccctccatatccatagaaggagctgaataacaggcagcattcaaatcaaaatacgaccagtccaaaccgaatttcatcaaacccagaatcggacgtctgtgcagataataggtacgtcccgttgaaattccggcaccccaatcgctatgcagacaaatatcgcccttatctattttcagactctgtttgccgtatgcaaaattaaaccatgccttccggtcggtccaaaccttttcctgccgttccgaacggtaaggactctttttctgtgccattgccacattcattgccgccgccagcaacaacatccatataatagctcttttcattattttgtactttaaaatccaactaatccgtataagttactttcatatatctgtcccaaaacttcgcactcccccaatcctgcgaatccatccgagacacccgcccgcgatggtccgaatcataagtataacctgctgccgaaaaactggcattctgctcctcttcagtgcttccctccgtataattgtgttccgtcaccagacgctcttccctcggcatcaggtaaccgcacatattcagcacgttcaacagttcattctcgaacacaaaggaagccagagcattcaaatcaatattgacatcattgggcacaccggctccgtccttacgcaccgacatccgcttcaattccaaaccggtagcctcatcatacgcccctatccggtcgtaaacgccatccttcacccaatgataataaatatgattctttgaatcctggatattcaccccgttttcatcccgtaagcaatacagatatggcacttccacttccgaaccacccgttgactgaagaatttcctccaacaaacccttagagtccagacgacaacgcaacacaacatcgggtcgcctattggacactacaataaactccctcgaagaaaaattgtcgaaaataaactcttccgatccttcctgcccattgaaaatcacatgacgcaaccggtcttcaacatattcaaaatggtacattccacgatctgtttcgatatcactcacaacacgcccctgatactggccgatgcttccacctcccggaatatcaccaccactgctgatgcccatccccaacgtcaggctgcccaactccatctcataaccggcatgggtcaaataaacataacaatagctctcagcctcctcaggcacaacaaaccgcaactcactgccactcacattcacaatcacggcattccactctctggaaacagttcccattccggaaccatcagaaacagtaccttcgattcgcacagactcgttcccgtcaaatccatcccccttcaccaacaccgtatctcccggctctatcggatattccatacttgtatacggcaaccgggccgtaaacggcaatttctcatcgtccagacaagccgccattcccaccacacacaagaatacgacagcaaatctgacaatctttttgaaaaaacgatttaaaagcatgactattttgtatattacaattaattttcaatgcaaatatataacacataaaagtgtcaaaaaaaaaaaaaaacgcttaaatattataaatatatcactatttagacccattccacctatctgaatctcccacctccctcccacctttttccgaagctcctccattgcttctccgttgcttccggctatgcgttcggatgagcttcggaggaacttcggaggaagaacgggaaaacgtaagaggggagtgagacatctgtgagaggtctgtaagacatcattcggagcgacccggacggctttcggtctccgtattcggacaatcacattgcatacttcaacacaaaaatcactgccaatacatttgaaaatacaagtcaacgcatatttcgtcctgtccatggtttattggcatattttttgtacttttgttagtaaacaactaaaaacgagaagacatgaaaattttgtatgtattgacagtatggatgctgcttgcgttagcaccgccggcaattgcacagaaactatccaaagaagagaaagcccgtcagcttgaggaagcatttcaggctacacgcacactgattgaaagcaaaaaattccaaatcgaaatcaaccgcgtatttccgacaagtgggaaagatgtatcccgcttcaaccctcgaggagaaatgagcatcaacgacacgattgccaaaggacacctgcctttcttcggtcgtgcctacagtctgccttacggtgaaagcggcggaattgaattcgacaacaaaatcaaagacgaaaagattaaaatcatcgaaaaaaagaggaaaaaatccattctttacaccttcaccgttgtcgggaaaaacgaccaataccagttcacgatagaagctattggaggaaacggttgttctatcagcctgaacagtaacaatcgcgcacaaatttcttattccgggacgatttcccccttggaaaaagagcaaaaagccgactaatcatattattaaattgcataaaaactgacataaatagttaaatcaatctctcaaaaagcctattctaccaagacatagcccacaagatgcaagagcaagtattttataaatcattttttttgcttaatcttgcagtttgaatgggatgtaatttctatgtccgaaattacatgatatattaaccaaataaattactatgtcacttaaaagaaatattcttgacttaagaaagaggaaagagattgtacttcagggtggtggcgaggacgctattaaaaagcaagctgcaatgggtaagctcactgcacgcgagagaattgaaggaattctagacaaaggttcatttcacgagtatgacatattcgtagaacatcaatcaaaagattttgatatggataaaaaggttctccacggagacggcgttgttatcggcaccggaactgtatacggagaacctgttgctatttatgcacaggactttactgtggctggcggttctttgggactgatgcacgcacgtaagatcaccaaaatcatggaccatgccatcaaaatgcgcatgccgctgatcggtatcaacgactcaggcggtgcacgtattcaggaaggtgttgacgcattggccggttatggagaaattttcttccgtaacactcaggcttccggtgttatcccgcagctttctgttattctgggtccgtgtgccggaggtgcagtttactcaccggcattgactgactttatctttgtggttgacaacatttcaaaaatgttcatcaccggtccggaagtcgtaaaaaccgtattgggagaagaagttagtacagaagaactcggtggagcacgtgtacacgcatgtgtaagcggtaacgctcatttctttgcttctacagaacaggaatgtttcgagcaaatcaaaaaattgttgacattcattccttggaacaatcagcgcaaagcaaaagcattccctgcaaaatcaccgaaagcagagtacaatatcgaaaagattctgccggccgacccgactcagccttatgatgtacgcgacatcatcaaagcggttgccgacgattcagatttctttgaagtacaggaaaactttgctccgaatatcgttgtcggattcggacgtatcgatggagagactattggtttcgtagctaaccagccgctagtattggcaggtgtattggattgcgactcagctgataaagcaggtcgtttcatccgtttctgcgacgcattcaatattccattggttaccttcgaggatatgccgggttatttgccgggtgttgaacaggaacacatgggcgttatccgccacggagcaaaagtattgtatgcatatagcgaagctactgtacctaagattaccgttatcttgcgtaaagcttacggcggtggttatatcgccatgaactcacgccacctgaaagcagacttcatgtttgcatggcctactgcagaaatcgcagttatgggaccggaaggagcagcaaacatcatcttccgcaaggatatcaaagaagctgagaatccggaagaaatgcgcaaacagaaagtggcagaataccgcgaaaaatttgcaaacccgtatgtggcagcatccaaaggatatatcgactctgtcattgagccggctgaaacacgcatgttgttgaaacactctatcgaagtgtccggcaacaagaccgtgatgactccgaccaagaaacacggtatccctccgttctaacagtctgtcatgtttgtaaagtcggaagactttattgactttatagcttttaaaacttagtaaaccgtaaaagaatgacagagaaattagaaaaattcatgctgaacggcgtagaatatcagacacgcctgacagacaaatggagaaacaggcaaaaatgggaagagccaaatccctacctgttggtttcacacattccgggcactatcatggaaattgaagtgaaagaaggacaagaagtgaatgaaggcgatacattgctgatacttcaggcaatgaaaatgaacaacaaactgactgctccttttgacggaaaaatcaagaaaatcaatgtacagaaaggcgataaactgcccaaaggcgcattgatgattgagatggaagaaaaataaactgtttgaaaacagataaaagaggtggttagaaatagccacctcatttttacatttttaccttatgaatttttttgtagcccaacatatcatcaaaaattatgcaagccaccgggccttggacgatgtgtcgatagacataccggaaggagccatctacggactgttgggtcctaacggagcaggcaagacttcacttatcagaatcatcaatcaaatcaccggaccggattccggagagttgtttttcaaaggccgcaaactggaaccggcagatacgaatcgaatcggatacctgccggaagagagaggattgtataaaaagatgaaggttggtgaacaggctgtatatctggcacgcttgaaaggcgtatccaaacacgatgccgtacaacaactgaaagcctggtttgagaaattcggcattgaagaatggtgggatcgaaaggttgaagaactttccaagggtatggcccaaaaagttcaatttatcacaaccgtactgcacgagccggaaatgctgatatttgacgaaccgttcagcggttttgaccctattaacgtggaattgctcaaacgcgaaatactggaattacgaaaaaaaggaactactattatcttttcaacacacaacatggcctcagtcgaagaaatctgtagccacattgcgctgattaataaatccaagaagattatcgaaggtcctatcaaccaaatccgaaacaaatacgcaaacaacacttatcagttaatctgcaaatatcagccggaattcaatccgcaagaagctatcggaaatgaatacgaagtgctctcggaaaagattgaagacggacaacatgaaatcatcctgcaacgtctggaggtatgtccgaccaacaccttgttgcgaagactactggacaagacggatatcatttcctatcagaaaatcattccgggtatgaatgacatttttatcaaactggtaaaagagatgcaataatatatgaacaagacattaatcattataggacgcgaatttacgacaagagtcagaaaaaaaagttttctgatactgaccttgattgtacctatcctcatggctggcttttatgcctttttaatgtggatgcttctcaaggacgacacacaggaaagaaggattgccgttgtcaatcattctgatatagaaacgcctttccagcaaatcaacaataccacttttgaatatgttgcaacagacatcaccgaaagcacggctcaggattttctgaaggccaacaacttttatgcacttattgaagtgccggaagatgttattgaaaacccggatatccctatcttatcctactcacaagtgccgatggaattaaaaaatgaaatcgcatcacaattgaaagaaaagatagaaagtatcaaacggaatgctgtcattgccgaagccaacattccggatttggaacagaagctggcagcagtaaagacacctactctggtgcgcacactaaaagtttcggcagagacaggcgaagcaaaagagagttcttcagaaatagcctcggcaatcggactgattgccggcatgataatctatttctttatctttatgtatgcatcacaggtaatgaagggagtcatcgaagaaaagacaaaccgcattatcgaagtattggtatcttctgtaaaaccattccaatttctgctgggtaaaatcattggagtagcagctgtcggattggttcaattcctgatttgggtagtgttcggcattgtattgatcattgccatgcaggcgatgttcttgccgaatatcgatttagatgctttgcgccaagccggccctatggtaacagacatgtctgccatgacaggtgccgcacaactgaatccggagcaactgcaaatcattcaaaaagtggcgcagaccatcgacccgatgtttatcatcagttttttgagtgcattcttgttctatttcataggcggataccttctgtatgcttcattatttgcagcaatcggagcagctgttgacaacgagacagactcccagcaattcctgacaccgctctcaatcatcctggttgtaggattatacattggcttcaccgccatgaaaagtccggaatccccccttgtattctggagttcactgattcccttcacctcaccgattgtcatgctggttcgaatcccgtttggagtacctgcttgggaaattgtaacttcgatggctttactggtagcatcatttatattcttcacctggctttccggacgcatctaccgggtcggaatcctgatgtatggcaaaaaagttacttggaaagaattatataaatggttgaagtactgatttaatcagtatttcaacacatctatttcttttcccaaacagatttagcaatacaatgagtcagcgttccagcctcgtcctgcacctggtgaaagacaacaatctggccgttttcttcaacaatctgataagatgagtaaatgctactatccggcataatttcgtgtgcataaatcacttcaacatctgtcaacacatatgtctttaaaaaatcaaacggcaaagaatttgtcagccagcgcatataggaagcttgcgttacatgaccgttaaaatcgatattatcaaaggtagcatcaaaatggcgtcctccttggggaaccatcacaaactccttctcattcagaatagattcgatttccagatgaggaatctgatgtccggtactgatagccaccaccttttccggctgacgcaacggacggcggcggttcagatcgatatacatccattcggaagtggcacgaaccaactcttcgccatcctcacgcaccatacgatagtcgcgggtagcaaaaagacgttctatacctgaaggccaagtctcaataaacacctcctcgttttcactcggcattttattcaaacgaatatgcagacgatgaagcatccaggtagctccggccgcatttagcgtgtcaacatccacaccataatatttggtctggacctctgccacatcattaaacaaatcacacaacgtcttgacaaacaaacgtcctttataattggtataatgcttgaagatttttaccttctcaatatgtttcgttacctgcataccatttatatttaaatttaaaactttctataacacatagacttccggttctatcatgacaccgaatttcacaaacacgcttttcttgatttcattagcaagatgtgaaatttccaatccggttgcaccaccatgattgacaagcacaagagcctgcttttcatagactccggcacgtcccaatgtcttacctttccaaccacactgctcaatcagccaaccggcagccaatttgtaacaatcttcatccaccggataaatcggcattccggggtattgttctgccaacttttctgcaaaagcacggctaaccatcggatttttgaaaaaactaccggcattaggcaagtcatttacgtcaggtaatttcgcatggcggatgtgaataatcgcctgccgaatcgtctgtaaagaaacctctccacccatcttttccaattcctcttttacgttaccataatccaaacggaattgaggatgtttagccaaacgaaaagtcacgtaagttataataaaacgatttttccactcctgtttaaatatactgtcacgataagcaaaacgacactctgctgcagtaatcgtcacacattgtgccttttccaaatcaatcgcttcaaccgatacaattacctctccagcctccatgccgtaggctccgacattctgcaccggagcagcaccgacatgtcccggaatcagcgaaagattctccacgcctccatatccctgtccgacagcccaggcaacaaaatcatcccatacaactcctgcaccgacccggacgtttacccactcatcatcttcttctgtcacaaccattcctttcatcgccggataaaaaaccgtaccatcaaaatcctcagtaaacaggaaatcacttcctccccccaatatcaatatctcaaaaggattccattcatatgctgccacaaaatccaataattccttctcatcatccgcctcaacaaaatatttgcaacagacatcaatgttgaacgtattatatggcttcaggctataattttcactgattttcatactttattcttagtaataactctaaatatctatctttgtactgcaaagataacgaaaacatgagcactttacctgtcgcattcgaagaaagaataaaaaaagaattcaaggatgaagcagcagcttttataacagccttgcaaagcccatcccccaccagtatacgcttgaatccggggaaaatatcctcaatggaacaatccggaatcatcacccgctgtgcaaaacccgtggaatggtgtccggaggggcattacttatccgaacgtcccttattcacacttgacccactcctgcatggtggagcctattacgtacaggaagcctcttctatgtttttaaaatacgtattagagcaagagctttcctcttcgcccgtcagaatgctagacttatgtgcagcacccggaggcaaatccaccctggcagcagccacgttaccaccgggtagcctactggtttccaatgaagtaatccggacccgtgcggcaatcttaaaagaaaatatcatcaaatggggacaggataatatcgttgttaccaacaacgatccggctgatttcaaacaattagcaggagctttcgacattatcctggtagatgccccctgctcgggagaagggatgttccgcaaagatgccgaagccatcgaagaatggagtgaaaacaatgtccgcttatgcagcgaacgccaacagagaattctggctgacatctgggactgtctgagccccaacggtattctgatttatagcacctgcacatacaaccggcaagaaaacgaaaagatactggaatggctgctcgccacttacgaagcggaaagtatcgaaattcgtcacacattcgacggcattacaccggcagactctcaggtatacggataccatttctatccacacaaaaccataggcgaaggttttttcatcggagctgtccgcaaaacaaacggcaaggaatatacatccaaaaaaaataaaaagaccaaaaacagcaaaccctctccgctaccgcccgaactgcgaccctatatccaaaaaccggacgactatacagcttggcaggacgagaatatatggggtattgttccatccggacatgccgaattcatccaacaacttgaacgagaactacgaatcatatacaaatgctgtgaactggcagaaatcaacaataaaaagataaagcttctgccggcttcagctctatggcaaggcctcaaccgacaggcatgttctatttatgaaacagattatcagacagccttgacatttctgaaaaaagaagatataccgcttccgtccggactatccggcaattggattctcatatcctatcaaggaatcgggttgggttggtgtaaaaacctgggcaaccgtcttaacaactattatcccaaagagtggagaatccgcatgcaaatcaaagatatcaatacaaataatcaataaaagaaaaccatgacatacacagaaatcaaatttacgatagaaccgtatgaagaacctgttgcagatgccctgattgctgaattaagcaatatcggatatgacggattttcatacacagacgatggttttaccgcttacacagacaaagcttcatataatgcagaggccattcagaatctggaaatactgcaatatttttcagagatttacagcatcaaaacgaccgttcaggaaattgaagatcaagactggaataaagtttgggaagaaaactttacccccatcgttgttgacaaccggattcaggtacgtgccggttttcacgaaccgattcccggtatcgaatatgaaatcatcatcgaacccaaaatgagtttcggcaccggccatcatgccacaacggccttgatgctgcgaacaatattggaacaagcatccaatatcaaaggcaaacgcgttttagatatgggatgcggcaccggtatcctgtcaatcatggcatctaaagtaggcgcctgcgaagtaaccggtatcgacattgacgaatgggcctacaacaatgccatggagaatctgcaaaacaaccacatcaacaatattaccatcaaaattggcgatgcttcgctgctggctgcagaaaagccattcgatataatccttgccaatatcaatcgtaacattctgctgaatgacatggaacattacaatgcccgacttcaaccagaaggattattgattatgagcggattttatgaacacgatcttcctatgatccgagaaaaagctgaatctctgggacttgaatacaaaagctatcatgaagagaaacaatgggtagctgcttgtttctacaaaaaataatcacgttgttaagaatataacactttcttgctttatccaatcctatatagcacttttgcactacgaaagacaaatataaagatagataaagcatgaaagttttaaaattcggcggtacctccgtcggcagtgcagaaagaattcagggagttgctaaactaattactgacaacgaacccaaaatagttgtattatcggccatgtccggtaccaccaatactctggtagagattgccgattgtctctattgcaacgaaaaaaagaaagccctggagattatccaaaatctggaagtcaactactatattgtcatcaccgaacttttttctacagaaaaatacatccacaaaagtaaagaattcatacaaaccatctttacttacttgcgttcgtttgtaaacaaggatttctatccgctacaggaaaaagccgtattggcacaaggtgaaatcatgtcaacaacattgctacactattacctagaagaatgtaacatacccaatacgctgctttcagccttggaatacatgcgtattgacaaagactgcgaaccggactacttctatatacgccaaaacctgcaacgtgaactcgcacaaccgggaatcgaaaacctcatcatcacccaaggttttatctgccgcaatgcatacggtgaaatcgacaacctgaaacgaggcggtagcgactactccgccgcattaatcggagctgccattcacgcagacgaaatacagatatggacagacattgacggatttcacaacaacgacccgcgcattgttgataatacgaaagccattcggcaactttcattcgacgaagctgccgaactagcctattttggggccaaaatcctgcatccttccagtgtacaaccagcaaaaaaagagaatatcccggtacgtctaaaaaacacgctgaatcctcaagacgaaggcacattgataacagccgaaaacacaaaaggcaacatcaaagccgttgccgccaaaagcggcatcactgctattaaaataaaatcgaccaacatgctattagcctatggctttatccgcaaagtgtttgaagtgttcgaagcctggaaaacacccatagacatgattgcaacttcagaagtggctatttccttaaccatcgactgcaccgcacaactcgacaacattctgaaagacctagaaaaatacggtaccattgaagtcgaccgcaacatggctatcatctgcattgtcggggactgttcagcagggaaaagcggactcggagcgcaagtactgaccgccttggctgaagttccattacggatgatatcttatggcggcagcgaacacaacatatccgtactcgtaaaagaagaagacaagaaaaaagcaatgattgacctgagccggaaattattacagtaacacaaaaagagacgaccatggagcaaatacaattaccagagggtatgccaaccccctactattattatgatattacgctgttagaaaacaccctggatgctgcattaaaggctgcatccaaacatggataccacatccactatgccatcaaagcaaatgccaatccagtgttaatcagatatatcagtaataaaggtttgggagccgattgcgttagcggcaatgaaatcagtcgtgctctggaatgcgggttcaaagccaacaccatcgtctatgccggcgttggcaagagtgaccatgaaatagaattggcactccaaagcgatattttctgcttcaactgcgaatctctgcctgaaatagaggtaattaacgaaatagcaggccgtatgaaaaaaacagcacaaattgcgctacgaatcaatcccaatgtagaagcccacacccatcactatatcactaccggcattgaggaaaacaaattcggaatttacttatacgacctcaagcgtgttatgacagccgttttacaaatgcccaacatccggctgatagggttacattaccacatcggttcacaaattaccgacatgacagtcttcagaggactgtgtctccgcgccaatgagatacagcaacaaatgaaagaacatggtctactccttccgtacatcaatttcggcggcgggcttggcattgattatgacaatcccgaaaaaaacaacatagcagattttgaggcctatttcaatactttcgcacaattttttgaacccatgcctcatcaagagatacattttgaattaggacggtccatcattgcccaatgcggcagcctaatatccaaagtactatatgtcaaggaaggtaaaaaccgcaaattcattattctggatgcaggtatgaacaatctgctccgaccagcactttaccaggcatttcacaaaatagaaaacatcagttctcaccttacagaagaaaaatatgatgtcgtgggacccgtatgtgaatccgcagattgcttcgggaaagacctctccctcaatgccacacgccgcggagacatcatcgtcatacactcttgcggagcatacggcgaagcaatggaatcaagatataatttacgtaacatcacagggaaagtctactccaggtaaatccctgtgatttctattgcaatattttaaaagcaatatccaaatactgatcgagatccatcgtcttttcccggtcgtacacatcgctacgcttatgtcccaaacgaaccacaatggcattcttctgcggaatcataaaaagatattgccctcccaaccctcggaatgcagggaaagtgagacctttataatgaactacccaaatctgaaagccataatagtccaatggtccgtcaccgaattcgttctctaaataagatgccggagaaatggcttcctgcacatactcctctgcaatcacctgcctgccgttccaattgccatgatgcaaaaccaaacgccccaaatgagccaaatcacgagccgttgtattaaaacagcaataagtcttctcatctccaccctcccggtcgagattccacaaagcatcattaccggtctgaataggtttccataatttctcctccgcatattcactgattgtaaccggaattgccgcctccaatacaaaagagagcagctgcgtatcaccacttttataagaatagcgcacacccggctcttctactggctcaagattcatcaccaaatcacgtatattatttccgtaataagcttctgtcgttttggaaataagagccgtatatgcctcatcccaattcagaccggaactcattgtaagcagatttctcaccgttattttagacttgtctccttcattaaactcgggcagatatttacccaccttatcgtctaaactctcaatatatccttcttgatgcgcaatacccaccaacaagcctacaatacttttcgttgctgaaaaaatattcgataaagtctccggtgtccatccgtcccgatactcctcatataatatactatcactctggattaccaaaaaagaaaccgtctgcatctcatccatgaaatcactctcctcttttgtcatttcataggtattaaaatgcgtagatgccgggaaatcccaacaggaatcagctttttccactctattggaggcaaaaatatatgtatccgaaatatctgggaaccaatatatcaaagcttgtcgcatataaaaaggcaaacagctataaaccaccgccaataatagcaatacgactccgattccaattaataatctatttttccgcatatcgacctgaattactacaactcctcacaatggcgaagatcttctgtggtcaaacgttccggcaaaaactttgtgacatctcctccattcatataaatattgcgtacaatcgtagagctcacaaaagtatgtacggtagatgtcaaaataaacaccgtttcgatatcaccatccatcgccctgttagcctgcccaatagcccgctcatactcaaaatcagcagccgtacgcaatcccctgataattatatgtgaatttacctgttgacaaaaatcaacagtcaaaccggaataaggctccacactcacccggtcagtatcctcgaaagccttttgtatcaacttaattcggctttctgtagaaaggaattcccttttcccgggattaatgccgacagcaataatgattttatcaaacaatttcaatgcccggcgcacaatctcttcgtgaccgactgtaaaaggatcaaaagatccggggaatactgcaattctttccattatgttatcaatcaattttttacatttgggagacaaacatagcgaaacaaacgttataaataaaagaaaaagtcctaaatcttaattttagattcctatttagaagaaatacacaaagtgtttgaaataaatagtgatttttttccataatttctccccaatttattagtagttgtcatttttgttttctatgtttgtgaaaagtaaaaacacaaaattactaaactatggcacagaaactattaatcagagatctcaccctgagagacggacagcaatcatccttcgcgacccgtatgactcaaaaacaagtagacagagtattaccattttataaagatgcaaacttttatgcaatggaagtttggggtggtgcagtgcccgattctgtgatgcgttacctaaatgaaaatccttgggaccgtttagaaaaaatcaaagcctccgttggcaatgtttccaagcttactgccttatccagaggacgtaacctatttggatatgcaccttatacagatgaaatcatcgaaggtttttgccgcaactccatcgaatcaggcttgggaatcatgcgtatttttgacgcattgaatgatgtcaacaacgtaaaatcgactatcaaatatgtaaaaaaatatggcggaatggctgattgtgccgtttgttataccattgacccgaaatatccaaagctgagtcttatggataaactaaaaggtaaaaagaatccgaaacctgtatttaccaacgcctactttttagataaagccaaacaaatggcagcattaggagccgatatggttacaatcaaagacatgagtggtttgatttcaccggcacgaattgcagaattaattcctttattcaagcaaaatctttccattccggtagacttccatacccactgtactcccggttatggattaggtgcggtacttatggccatcatcaagggcgttgacatcgttgataccaatatctggaactttgcaggcggtaccggagcaccggctatcgaattaatttatattttctgcaaaaaattaggcattgaactggatgtcaacatggaagcagttgcaaaaatcaacaaagaattgtttggcatccgcaaagaattggaagcatttgatgccagcaagcaattcccaaatcctttcaatcctctaacggacacactgcctgccaatattgacaaagaatttgacaatgccattgcagcagccaaggccaacaacgaagaagcacttctggcagcttgtcacgccatcgaagcatacttcaacttcccgaaaccaaacgaactggtgaagaaagccgaagtgccaggcggcatgtacagcaacatggttgcacagctgaaacaattaaactctatggatatcctggaaaaatcaatggaattaatacctacagtacgtctggctgccggtctgcctccattggtaactccaaccagccagattgtaggagcacaagcagtaaactgtgcaatggacatcaaggcaggcaaaccaatgtacagcaacgtatccaaccaatttgtcaacttagtgaaaggtgaatacggaaaaactcctgtgccggtagatcctgaattccgtttcaaaatagcaggaacccgcgaggaaattccatatgataccagcaaaaaccaaatgcagcctaacccagaattaccggaagcaggcggtgtgaaattggcagcaactgaaaaagaagtactattgctcgagttattcccacaggtagctaaaaacttcttaaccaaacaaaaaacagaagcctatgcagctcaacacaaagcagaagctccccaagctaacacacagacagttgcagacgatttggcaaatgccccaattaccggcaaaaccgtcaaagcgcccatgccgggcaacgtactacgttttgcagtaaaaccaggcgacaaagtaaccaaaggacaaaccgtagtcgtactggaagccatgaaaatggaaaacagcatcgcttctgattacaccggaacagttaaacgtctattgctaaaagaaggttccaatgtagcagcagacgctcctatgattgaaattgaaatctaatctatatccattccatgaaaaagctcggttaaaaaccgagctttttttattagatactacaaagcaatttctcaaacttcgacgactctacatctggaaacatacagcacaagtgatcaagtatacgcaacattgactgccggggagtacggccctctacctgctcctccaccggaaacagatgcggatacatagcctctggtgtacaatatcgggctaccccccaaccataaggctcaccttttttcgaaatcaaatattcaaaatctgcaatacacacatatgttcccacttgcaactgggcaatcaaggcatcaaaagccattccgttatgcttattttcaacaggattcagtggattagaaggattaaatactgtccgcttacgactcaatgtaaaaccacttgccactttcaactgtttcgataacatcgactcattttccaccaacacatgatatatatgcaatgcctcttgaggcagttcctccagaagtactaatgaccgtctccaattcataaaatcaggcaaccactccatactgacatacccagcctttcccttgaaaaattttccgtaagcagcctcccactttgcaataattgtccccttccatccccatggtccttgtctaaaatcatctccgaaaagcaaatcaggaggagtcatttcctcaatggaaaatcctctgatattattcttgaaaaaaggtaaaaaaccccattcacgaatcagattctccacttgctcctgccgctctattatcatactaaaccgatccatcatttcatataaactccattccagttaaacacccaacagaaaaagcattcctgttattccaatataaatatagatcacataccgaagtaacacaatagatatatgccgaaacacatatgccccaacaacattcccgataatcaccccaacaattccggaaagatacccggtggcaaccgccgaggtaaaaaatccattatacgcacgcgcaaaagtcataaccaaatttccaaacaaaaaataagcctgcgtcatcgcaatataatgattcttatcctgctccgcattaacaaaataaagcactgccggcggtccttgcattccgaaaaatccccccatcagtccactgacacccccagcaataatctgcactagcttagtcgtcctcactttaatacgtttactgaaaaatataaaatagacactcaccactatcagtgtgatacccaacaaaatattcaaaatactatactccatcctcttcagtacaaacaccgccccaatcgacacgaccacaaaagtcaacaaaataggcaagagcctatcccaaacaatgtatcgccacttctgcactacaatgataaaggaagttgtcatagccagaataccagaaagcgtcgtagcctctccatacgacccgagaatagcaggcaacatcgtcataatgaagataccaaatccaaagccggccgtccgctgcacgaaactagccccaatactcaatatgaatagctttaacacaatttccatttccacaaaaatacactcttttggaataccaaagccaccctttaccaaatatattttatcctacttctgcattaaaaaggttttccatcaattgatacgattctaggctctcccctaccaggcaacggattaaatatgacaattatgtgctgattcttatctgcatccacacagataaattcataattagtaccagccacaacttgagtacgcactttcaccggagtaaagcgcacatcatttttcatcgcttgaataaaaagagcccttacttctggagaaatctcaacagtctttccataggctccaaccaaggcattattattgcttttacaagccactaaaacaaataaaataacaagaatacaaaaaaaacgattcatagtatatacccttattttcaatcaatttaaatgaagcattttctttaccacaatcattatccatacagacatgacaaagggagcagtcaaggtaggtatcccccactccattccaacaagttgtaacaacacagacaaaacgacagcacctatcgcccaacctaacgaaacaagatttttaccacctaaagccattgcacacagtacaccattatatcccaccaagcccatatttatcgttggagcatcaaccccaataagcaaagacaaaagaaccggcaacaaagcccccactatcgcataaaatgccccaatacgagaatgaaaaagaattgcaaccaagaaacatagtccactcaaactattcccctgaaacatcacctgacctattcccgcacccaaagactgcaaataatcgacctcattccccgttaaagcaacagatgcagactgcaacagatactgcggcatccaacaatgacaaacccctaaaagcaaccatacagaaagaataaaaggagctgtaaatagagggagtagattctgacgtttaaaaagccatacaatccccgttgaaaacgacgaagccagcaccatcaaccctattgtcaaaggagtaagtgtcataaacacaccgacagctatgcccaccaaggttccattgaaaccatacaatcctttttttatttcatcccgattaaaaccaagcagataagcagttagcatacttaccatattccctccaagcgccaataacagcatttgccaccctcctaaaaatatccccaagagcatcaacaaccccgaaaacgcattggcttgaaacagcacctgccccacaccacacccaaacacaattatcagatcatacagtttgtttttcatcaccacttaatcagttataattcactaaacgatggtcttctttgtgcttcaaagatagcgaaaatatggtaaatgaatacttattcatgtcctaaatgaactttaaaaagagctgccctcagctatgtgggcaaactgtatagcaattaagatattaacttagcatttcgggtatgataaataccaaaatggaggtacaagccgagaatggtgctaaaaatcactaacttacacattctcagatacttgccagcctactggttgtaccttttagagcgctatgctgttgataatcaacaatgtacacatactgcatcggcaagtgatacaaagaaaagaaaagcataaaaagagaaaatataaatctgtaaagtgcgaaaaatcaatgattttataaggatttgcattttctctttttctccatactttctgcctgttttcatatttttttcgtaattttgtccccagattgtcccccgaaagggatgcgagggacaaaaatctgtcccccgaagacaatgaatcacatctctcattaaaataggaacaggctatgactaagaaaacaacaatccagaaagaacccgtaaaattacgggaaaagaagttggcaaacggtaacgtgagcttgtatctcgacatctacagaaatgggaaacgtcagaaagagtatttgaaactttatctgatcgatgccactactccgctggagcgtgagcaaaacagacagacattggcaaccgcccaggctataaaatccaaacgcctcattgaaatgcagaatggagagtattctttcactcgccaattcaaagaagatactccttttctggaatactatcggaagatggttgaagaaagacacaagaatcctgaatctgacggaaactggggtaactggagaagctgcttgcgttatctcgaaatctattgtgatgagaaaaccacattcaaagatattactccggagtttataaacggcttcaaggattttttgaacaatgtggaaaaagacactcacaagcgtaccggtccacgtagggaaagggatgtgtttcaaggcttgtcccaaaactcaaaagtctcttatttcaataagctccgcgcctgtatcaaccaggcttacgatgaaagaatcatacctgtaaatcctttgcgtggaatcgagggattcaaagccgcagaagtaaagcgtgactatctgaccttggaagaggtaaaacagttggctgctactccttgccgctatcctattctaaaaagagctttcctcttttcatgcctgaccggacttcgtaaaagcgatattcagaaactcacatggagcgaagttcaaaaatttggagattacacaagaatcgtcttcaaacaaaagaagactggcggacaggagtatcttgacatttcctcacaggcagaaaaatacctcggtgaaagaggcaacccggaagatcccgtatttacaggatttacatacggagcttggacttcattggaattacagcgttggagcatggctgccaatatcaataagaatctgaccttccactgcggaagacacaataaaaattgtatctttcaagctatgagataattaacagagaaacaaaacagacttgttaacggtttagaaaccagcgaacttctataatctgcctcattttgcatcaagcgaaagaacgtccttactttttgcaaaggtacaaaacagtccccgtctttgcaaaatttcccgcaattttatttcgcccgcaaattttatcctccatcatttttcctgttctgaaaacggcttccggcttgatgtgcgcaagcccatttcagaagcagcacaagcaaagaaaagcccacgacgaccacaatgtcaccagtgacactgccatcgtcgcggacacttcttttatgtgcttgtgctgaacggccaagaccgtcttattcgtttttcttttttcgtttccgttgtcagccggaaatgccgccggatgcaggacacggcaagcgtgaatctgctcctgcgactattcccggctgtcatgtgtggcctgtcttccaaccgtcttgccctgccgttgccaatcggagcaatggcaggcaagaccattttcagacagatgccgccggaggaacacccgcgaccgcaagccatgcccgcatgacaatgacggtcacgggacttccgtcacggcggcaggaaagcgaggctttcccttgtcagttgcgccgccctttcgattttcctgtggcgcgttgcgccatttcacatacttcccccttttcctttccgtctctccaagtgtatgccaatgtccccatgccgccattccagacggcatcagtggtcattttcgttgcaggggcaaaggtaaagacgggattaggaacacaaattttttagccacaatctccacacttcgcaggctcaggtagtattctgtcgaaaaaatttgctgaacctactcccctgacctttgctttttcccctgaaacgaaaacgaccggtgcgcggtcggaagacgtcacaaggagacatcggacatacggagaggcgaaaagaaaaaggactcgacccgacctccccatccgagcaagacaagtaacaacaatctaaaaattggaagatatgagaatgacattgaacgacatcggaaaggctatgcggagcgtattgtccgcaatggtgagagcagcatggggcattaccctttgcgcaggaggtttggcggtgggcatcgcaggggaaatcctgctgggtatgttgaacttcatgttcggcatcctcaccgccctgctttcagtagtggcagctatcggaattttcatttggttattaaccctttaattcatacggatatggcgaaaagacacagcaagacagtggcacaacaatgcaggtattacgaggtggacaacatcttcgagtatatggtagaggtgtgcatcaacggtaacttttcctcattcaggaggttgtaccacgagttgaacaaggaggcaagaaaggacttcatcgcctttctcatcttggaatgcccgccccaataccacatagagattttacagaaaaccgtataaccatcttaaattacagacaatggaaacttttgacttttatatggattgcaaggtaacttgctgggaacgtacccgcttctccatcaaagcgaacagctatgaagaagccaaatccatcattctttcatgggaagataaagacgtgaacagccatatcggtatggacgagaacgtcatctattgcgactacgaattgaaccccgaaacggtggaaggactgtcccctgcggaaaacgacaacaaccctacgatggaaatctacggacgggatgacgagttgttttatcacaatatgttggacgaacaatagagcaaagttatgagaacggaaacgaggaaatacgaagtttacaaggtggacgagctttcggacaaggcgaaagagaacgcctattggaagtggttgaaaggctttgaatatgacgcatccgacaacagggcaacgttgaaagcctttgaggagattttcaaggtaaaggtaagcaggtggaattatgatgcctgtacctataatttccaattcatctcaaattacagcggggaagaggaagaactgtgcggtgtgcggttgctgaaattcatcgtgaacaactattggcacaaccttttcaagcccaagacctattggcacaaaaaggacttccacaaacagcgcagaagtcggatatccgtaaccaatgattgtgtgctgacgggttattgtgcggacatggacatactgaaacccatatacgactttctgaaagtccccgacaagcatacgaacttgtatgacttgatgaatgactgcatcgacagctttttccgcttttgcagggatgatgtggaatatgctagcaacgaggaagcctttgagcgtgattgcgaagccaacgaatacgagtttttatccaacggagaatttttcaaataactaaaatacatacagatatgaacggaacagaccatttcaagcggaccatccaagcctatttggacagccgtgcggcggaggacaagctgtttgcagcaagttacagcaagccgaacaagaacatggacgattgcatcacctatttgttgcattgggcgaaaagccaatgcaatggaggcaacggcataggcgttaccgcaggggaagtcttgtcgcaagcggtacactattttgacgaggacgacatcgacatcggcaaaccaatcccgtgccaagtcatggtatgcggagttgaactgacggacgaggaaaaggcggaagcaaggcagagagccatccgccaataccaagacgaggaactgcgcaagatgcaaaaccggaacaaggctaaggcgaaccaaaagacaaacgcacaacaagttgaactttcattattctgaacctatgaaacccaagacacccatacagaaagaagtcatccgtctgagcgcaaccctgcccgaactgacaaacgcacagagaacctacgctttccaccattgtttcaagcactacggcaggcggactgcaaaaggcgtcattacctgcacggagtgcggacacgcatggaaaagcggacacagccttgccgacacgctttgcggatgcacctgcccgaactgcggcacggcattggaaatcacggacacccgaaagagggtgttcgtggacaacgagtatttctccatcatcaccacctgcaaaggctaccaggtaatacgtttctttttcgtcaggagccgtcagaaagtcgggcaaaaggcggagtattccatctttgaggtggcacagcggtggattgctcctgacggcaagtccgagacagtggcaaggttgcgtggcttttcacttctctactacgacttgtggaacgaggacagcccgatggaaatccgcaggaacaaccagcataaggtgtatgacattgacccgatatgcacctatccacgccgacggattatccccgaaattaagcgaaatggctttgacggcaacctgcacggcatactgccttacgacttcttcaaggctatcctttcggacagccgtgcggaaacattgctgaagtcgggcaacatcgaacacttgcgctatttcctctcccgtccgcaggtacttgacagatgttggaactcgtacaagatagccatgcggaataaatatgccataaccgacatctcattgtggtgcgacctcgtatatctcttagagagattgggaaaagatttgcgcaacccccgtttcatatgcccgcccgatttcaaggcggctcacgacctgtatatggggaaacggcaagtccaattggagcgtgaacggcagcagcaacacagggagtgggaagccgagcggttggagcgtgagcggaagcgtctggaagaaatggcgaaagagaaagacgagtatatccgaaagaaagccgcattcctcaaccttgtactgacggacggtctaatcatcgtcaaggtgctgcaaagcgtggacgagttctacgaggaggggaaagccatgcaccattgcgtctatgccaacgcctactacaacaatgagaactccctgatactttccgcacggatagacgagcgacgcatcgagacagtggaggtggacttgcggacattaaaagtggtgcagagccgtggcgtatgcaactccaacaccgaataccacgaccgcatcatcaaattggtggaggacaatgccgagcagatacggaaacggatgaaagaagcagcgtaatcgtttaacaacttaatacttattgatatggaagtgagaatagaaaacatgattttcgggtggcacgagaaactgcctgaaatgttcatcgaattgttgaacacgcttgtactgacaaaggacgagcaggatgtaaggggggtaatggaggtgttcgcccgaaagaaacttttcaacgcccttttcgcattcgggtatggcgcacaccatctgtgggtgacacagaaaaaggcatccgaccccgaccaatgtttggagaacagattactgattgttgaattttaattgataaggctatgacaacaagaatgactattaacggagtaagcacctgcacggcaggtgagaaatacgagaaattccaactgaaaatcgggcgcaaagtccgcacgatgtaccaatatgactatcgggacaccacaacgggagaactgttctcctgcgtgaaacccacattggacgagtgcaggcggttgcgtgacgaatggattaaagcgaaggagggcagacgatgagcgcaggatatgaaacgctgatagtgacgttcagcgaccctatcaaggttttggacaatatgttcgccgatgcggacgcatggggaacggacagcctcaaaggatgggtggaggactatgaaagtacgaggtttacgcagataaacgggcatacggcagtcatcacttccgaatacaacatgccctgcgtaaaggaatggctcacacgctgcacggctatcgccgacataaaggaattttgagtgcgtggcggtggaaacaccgcccacactccattcgtaacaactgaaaaaacaagcgaaatgaaatactatttcatactgacagacggcagggacgcatgggtgcagttcgtttacctgcccacgcaagatgaagcgtccggttatatccgagatttgcggagcgtgggaatatccgtacacgggtataacctttggaacaaggacacacgccccattgccgagcgcacacttgagcgtgtgctgcaaaggataaagcggtaaaatcgggcggcaggcttgccgcccgctactttctttcatgagcaggtcggcggataagaaagtagcaaagaaaccgttgcccccatcttcgataagatggaaaaatccaatgaagtcattaattatatatcccagtctggtttgataattgtaggataacgttgttgcctgacaatctttaatttttctatataatataaatatatctctttgtatgaaccaaaccccggttgctgcatatcctctttgatggataagccatcaaaaacaagaagccataatcttaaagcaacccctaaatagccccaaagaagatccatttcgtgcaattccagtttagtaaccaaattttctattcgaacatccatatctggatgggttccaccaccagaaatagaatcctctcccattaataaaagggctgctaatgtagttgcaattcctgccttataggttcttccccatgcagagttatattcagtttgaataaagctaattgccatatcatctgctgcaatttcatcatttattgaacgagaaagcgtttgctgtatttgtgtatgccccaaataattatgtgaaaactcgtgagcatatataaatgctattgcagcacaatagacatcattcgcatggcttataatattttcaaattgctgcggattacagatatttggagtaacccaatatgcatctctattaaagttatgtaataattgccgtcctctgaaaaaacaatcattgccatattctacatctatcatattgggcttatatccatttttattaataccaacagcatccatcatagggatatgtataacattttcaaaatatgcgataagatagacacaaacagaccataaatactgacagaaattttcgttgatatatatatgatttaatttattattatcttttttaatttccgcaacatcactaatagctttctcatctcttatgaaagtaaatcggcgagaaaaattattgctattgcaatcattttttacagcatctaataactcaaaaactttttcaatatattgaataacatcatcagataactgttctacaggtaaataatagatttctttcggctctttcatttttcgaaaatttatttgtaaagataatatgtttatttgtattggaagcaaaaattccttgcgaaattatttaccgcaaggaattttaatcatatcacggaatatatagcaacgcaaattctgtttttcttcgattgaatagcatggcgtgctgctttcctttgtaccggcagtaagcgatatattcacggtaaatgtctcgattcccggcttccagcttgcggatgagtttgcttttcgggtgtccgccgtgaccaagcaataccccttgacccacattgaaacttaatacggtaagaagcaaggcatctttaccaaatttgcggaacagcttgtagcgcaccgccaaatccttgcggagcagggcttcggcttccgcctccgtcatgtcataggaaaggttttcgttgggcaacctgcgatgcccgtagccgtagtaggggtaatcggaacggtcgtgcagtccctcgtacttttttatcagttcaacggcgatgtcagccttgggatgattgttaaacgatgccagcagttccgccatgctgtccgtgtcttgtgccggcaggctgccacagagggcagccgccagcagcaggagcaacgccttgcgcatcatcggctggcgttcaaggtgtcagacacagcgacgcctccctccgtttccgcgtccgagtcgttgttgaactccaattcccactcgcaggcattgccgaaattgtcctccaccgtgatggtcaggctttgcgactcgtcgcactccgaggtgtaatataggcggaatttttcgttctccagcaggtagcggtcgttgggctgcaacaccaagccgttatccagcttcaacgtgccctccccgtcgtattggaaatagcggatggtatagaccgccccgtcaaactcgccctcgcgtaccagttcgcaacggatttccgccgtctcgccctgcgccagttccttcggcacgggcatggcttccaccgtgaacggataggcttgcgtcacgtccaaatcgtcatcgcaggcggtgaagcatacagagagcagccccagacaaagggttgccaatgattttactatgtttcttttcactttccgtgtattgtttaatttgttcatgttcataaccgttacattttaagtttgatgttcttgttgttcttctcgttttgtttcagacggctttgcagatactcgttcaagtccttgcatccgccgtagatgccggagcagtccgacaccctttcgccgtaacgtgtgcgcagggcttccaatgtccgccgcccggcttcgtcgttgtcaaggtggcaccgcaccgttccgtagccgtccagatgccggtacgccctcgccacattggacaccgagttgaggacaaggtggtcctccccgccgccgatgcctaatgcacgggcggaaaggtagtccacaaagccctcgtacacgttgcaaacggcagagcctgacggcagcagggtgacgtcctttggcggcacacagcccttgaagaacgggttgcgtatctcgtagccgccaccgcagttgccgaaagccacggcgaaataccgtttcccgtgcgtggagtagcgcatctccttgcagttcgcgatggctatggcggacggtatgcccctttcttgcaggtaatggagtaacgcccggctctgcaagggcagcacttccacgtcctcgaagctgtgtccggctggttgccgcacttcgggggtgcggcgttgctcatagtcctgcaacggcatgtccgccacctccgccacatacctcgcctgtgtgaggaagtcgccgctttggatgaactcccccgcaagggcgaagatgttaccgcccttgccctcgccaaaatcaaaccagaggttcttttccgggtttaccttgaaggaaggcgtgtgttcctcccggtacggcgacctgtaccagatggcgttggcacgtctttgcacgggatgatgccccagccgtgcaaggaagtcctccagcggatagcgtttcatcgcttctatatccatataggcgcacattcagttgatgatgaacttcacgcctatcccgtattccgtgtggcacacgcccatgctgccgccccacaggaagcgttcacgcagcgaggccgtcagcgcaatgaagtccacgaggtacagctccatttccagcgtggcggcgcagccatagacaaaggcgtccttgttgttcagcctcgccccgtcgtacagcgtctttccgccccagttcaccgtctcgtacccggcaagggctgacgcgccagcgtagaagaacaccacctttttcgcgtccgagaggaagttgtagtagtaaccgccctccgccgtgaactgtgccgcagggatggtcgtactccggtatccgtggctggttttcaggtattccagcccgtacacccacttgttcccacctttcgcgtagctcgaaagcatggctcccagcacatagccgtccgcctcgttcagcccggctctcaactcgatgccccgcatcttcggcaggcaccgttgggcttccgcccgtcctgccaggaggacgaacagaagcgttacaataaacagtacctttcctttcatcgcacgcgcagttcgttgatggtttcagcctgtaccaagtcctcgttctccacggtaaacgtctggtggcgtccgccgtccttctcgttcatctccaccacgagctgcttgccgtcggggatggtgaacttcggaaggcagaacaccgtgcgttcggaccgcttcccggctacacggacggcgtagttgtaggcgcggagcgggaacagcacctgttcctgcatggcggtacgcttcgccaccttcttgtccacaatcttgaacgtgatgtagtccacgtcaaacggcacattgctttggttctttatctccgtgtagaaatacagcaggtcattgtggacataaatccctttcagcaggtactggatgccgaaacgcttgcagccgatgtgcttcaccttgcgcttgtcctccttgtgcagcgacttcatgatgaggtgtaccagcatcgggctttcgctgcccagttccttcaggtagatttcctgcgcgttgttcggtcggttcaccgtgctgccgtcgtggataaagtccttcatttccacgttcaggataagcggctcatcggcgtatttcacattaaatgtgtaaaatgacccgtcctccgtgatgacgctcatgttcgtctcgttgcggaaattcttgaccgtcgccttcacacggatgacgttctccgcaccgtccgccttgcccgctatcaggttgggcgaacccaagtccacgtagcgcaccgccgccggaaacaggatgtggacggtcttgtcatacgtgacttccaagccgtgcggcggtatcatgcggtcgaacatcagctttttcgtcagaccgtggtacaggtcgccgtcctcctccgtctgcggatagacgtccttcaccagttccagcccgtcctccttggcggtggcagtgctgtcgttcgtcactccctgcgcgtagctcgcacaggcgatgcccatcagcagggcaaacattgtcattactttcttgatactcattttacgttggatttagtggtaaataaaaattagtttgttgattattttttctttttttgcctttatgtttttggactgttcattccttttcttggtagagcaataccctgtaccctgacttcagatgtaccttgaccgtgcgcatccttttcgagatgtactgcgagatgccctgtatcgcccctcgccccaagtcggaggcgagctgcgcccccgcgtcggtcgatatgttgatgctgcttccgagcgagctgcccatgttcgccccgatttcctttgccgcgtctatctccatcgagccgggtatgaagatgcccgcctgcccgtcgctgtcgtacacctccagttctaccgggatgatgtttcccccgtgttccagcgaggtgatgccgatgccgagcctttcgccctgcaaccgtgccgcgcccacaaggagcgtgttccgggggatgacgcgccccgacacgcgcatcggctccagcagccggagcttcaccgtctgcccgtccgtcagcgtctggtcgccctgcacacaggcggcgatggtgttcttccccgtcgtttcctccgcaccgatggcggtgtggaagccgtagttgcgttcccccgaatagtccgcgatgaacgccgagtctgtcatgggctgcggcagggcggacaccaccgtccgccttacatcgcttacgggttctgccttcatgctcttttcgcctgtactcacagaacctcccgtttcatcgggctgtgcggcttgtccggcattgttgtcattctggtacttcgccgccagctcataggacttttccaacagggcgacctgttcctccatcgtggaaggcttgctatcctgcgccaccagcatggcttccagttcgtcgatgcgctcccggagttcctccttttccgtgtcctccttcggcggctcgtagaacgtgcccagcgaggtgttcagccgttggtaggcggcagcggaagtgcggatgcccgcctgtctttcgtccgccgtttccccgtcggtcgtttccgtccgtgtcaggcggtaatcgtccgaagtgtcggcatcgtccgttggcgtgtcaccgtcgctgtcgttccagaacgcggagaggtcgcccaccatgccccggcgttccttccgcttgttttccaaatcctgctgctcgtaggctttcgccttgtccccgatgattttggagtcttcgggcatgggcatgtccgtgttgaatccctgtccctgccgttctttctccttgtcctcggaggacggcgcgaagatgagccacatacacccggcgaacagcagcaccatcagcggatagaccagcatcttctgcctttgctgacgctgttgttccgtcagcggctttttctcttttgttcttgattcattcttctgttcttttgtttccatcatcagttcaattagcttgtcaaagtctgatttttatacctttattctctttgcttacctgattctgtaagcgaatgggcattttatgcgtacccaaagaagccggatggagctttggtttgtttttatccggaaacaacctgtgttccaagcgttccaatcctatccgggactgttctttgatgatgcggttatgatgccctaccatatgcttgggataagtatcgtctcccatgtcacaacggataatgtaatccatcaacgcatcgcttatttttccgaatgattccgccaacccatacttgaccaacagaggtttcggaatttttgtctgcccgtcccatcccttttgagagagtccatgaagcaccatccgttcccggtgcagggctttccgatagtcgtccgggaacttgccctgcactttctgctcgtacaaatcggaggcactgcgcataatccgtcctttttcctcctggatggccgcatcgatggagtccgccgaccagtgattgtccgcacgcatttccttggcccgttcccattcgaggtcctctatcttttggtacatatccatcagaccatgcctgatggcggtcaggtctcccggatattccccatgcagggcaagccgcttcaagtagtcgagttcctcgtccttcatgcaataccctaccagcttatgggcggtagccacttcttccggattgggcagaggacatagggtatggcttttacccgtatgggcactacaaagcagcgtgtacatggcattcagtttttggggaagtgtttcattccccattttcaatccggacaacaaccagacctgctgtttgccccaatcggtttgttgcagtacatccataaccttgtgccagccgctgcgttccgtctggtccagattccggaagaaacggtaatcccagagtatttttgcctgctcttccgtaattgccgggcgatgcccgttccttacgatggaatcggcaatggcattgtaatccaagcgaagcacctgatggcagaacttcaaggtcggtttccatcggaatccggcatcctgcaagttttccatcttttcccatatccaatctgataatttcattgtggattcaaatttgagtgatacaccttattatatatttctaacttctcgatgtgccgtatctccaatgcctcttcccctttgccgaagccgatgattgcggcggcagtcatgtagagacagagcgaggcgaacacggcaaatgccgcaaggactatcctaagccgtgctttgggcggcagggcgtccagcctattgcgtaaccaacctttcagcccggtggtccacttttcaatgagatttttcatctttcccatacgcattatctttcaatcgtccggatgtccttgttctccaataccgtgaagccctcgatggtgaagccgtttgggttgtcgtccgagcggctcgcgttgagcaggcggcaggcggttactaatgtccgttccgtcacgttgctctcgcggataatcatctgacgggcgtatgtccgcgcctcgtagggatagcggtcgaaattgcacaccacgctgtccacctgcaacacttggttgatgttcccggcgatgatgcggttgtagaagcccttttcggcgaagtcggcgtaatagttgtacgcgctcttgtctgccaagagcagggcgcgtttcacgttgtgctctatcgcgcttttctccggcgagagggtgaaaaacagttcgtggaagcggcgcacgtgttccctggcttccgccgggcggttctgcgacaggtcctgcgagagcgcgagcataagactcttgcctccatcgaggacgtatatcttctgccgttgcgcctcggcgaagcggaaggcgcacaccaccgagcagaccaccacgagggcgcaggccgccgtatagacgatgccgaacagacgtatctgccggaaactcgtctcgatgttcttgagtgatttgaattccattttcttcttttcgtcttttaattgttcaataatccgtttttaagggtcgggcaactcacggaaacggattgtccggaatgcctatcttcggaacagctttcccgccgttcccttgatgagcttgcccgcgcggcctgccacgtttcctgcggcggctcccgccacgctgccgcccaaagccccggcggtgttgatgttcttgttgtagctgcctatgccgccacctgcttggatgatccagcctgccaccgtcgggatggtgaagtagcccacgatgccgatgatgaggaacacgatgtacaccccgttgctcgcctccaccgagaagttcgggtcggtctgcatcgcttgtatgtcgttctgcaacatcagaatctgtatcttcgccagtatggtgctgaacaaatccgacacgggaagccacaggtaaatctgtatgtagcggctgaaccacgccgagagcgtcgagtggaagccgtcccatacggcaaaggcgaaggctaccggtcccaggatgctcagcaccacgaggaagaacgtcctgagcgtgtcgatgatgagcgcggctgcggcgaacatcagttccagcagttcccggaaccagtcacgcaccgtcttcttgatgttgtacgccgcccggtccatgtacatccccgtcatcgtcaccaagtccgagggcgaccagcccagctcgtccaactggcggtcaaattcctcatcattggcgaggtaggcggtctccgggttgcgcatcatcgcctcgtattccagtttgtctttctgctcccggtactcgttcatgtcgaaggtctgttcttcgaggatgccgtgtacgccctgcacgatggggcttaacacgctgttcatcgtacccaacacgatggtcgggaagaacaggatgcacaaaccgagcgcaaacgggcggagcagcgggtacacgtctatcgcctcggcgcgggcgagcgactgccacacgcgcaccgccacgtagaacaacgcgcccagcccggcaagccctttcgccacgcccgtcatgtccgcgcacagcggcatcatctcgtcgtagagcgaaaggagtatctggtgaaggttgtcgaactctcccataacttaccagtatttttcgttggggtttccgtagagtcctatcacccggtccatgtcgttcttcttccttgcccggaggtaggacaccgatatggtcttgttcgtgtagtagcgcacgaggttgcggtagttcatcaggctgcggtaggcgttgtcgataatcgccagccgttccgcgtccgtgagcgacatccccgtcacgttcaccacgttcttcaggtcttgcagcacgtccgaactctcgtctatcagcatggtgtagcccgacgatatggcggcaagctcttccggcgtgtagttctcatcagagagcatcttctggtagttatccacatagatttctgatatttccatcaccaacccgatgcttttcgacaccttcacgccgcccttcaccacgtcatgtacggatttcagcgcgtcgtaatacttctttccctgctcaaacactttcttggtttccaagaagccgttgagcgtgttggctttcgtgcccgccgtttccaccatctccttggcggagttgatgatgctctgcgcgaggttcgtcgggtcggacaccacccattgggcgtttgccgtgcctgcacctgcaaggcacaggcaggctgccaccaatggcattttcagtttttgtctcatattcacattggatttagtggtacattcttattgttctttcttcttttcgccattggctgtttcatccgtgttcacccggatatagtcgccgttaggcgaaaaggacaggatgtccgtttcctcgttgtatgccacgtcgatgcggaagcccgtgttcaggtagaggttaccgtccgcctccctttgcagcaggtaggtctccggcttcagtttccggtggacgcccgccctgcggaacagcgtcaccttgtaaagtgcgccctccttgtacaccaatatgtcgggcttgccctccacgctctgccagttgccgcaaatcttctcgcggatgtcttcgttttctttcattaccgtctcgcaggcttgcagcatcagcgacgccaagcctatcagaccgccgcaaagcagcagccgttgtgtctttgtcagttcaatgttcataatcttcaattcttgtttttttgttgataaaatgtgtcttgacctcatacgccgtttgatacacccttatatgccgtataaggtggcctcaaacgccgtctgtggtcgggtgatgtttccatcggttacttttcttcgtccatacgtttctccgcaatctgccgtatggcggcttccatgtcgctgcccagcttccccgccagttcgcggacttccatcttctccgtttcctccgttgtataggcaaggtattcgtgtatggacacctccgtggcgtacaccgccgactgtgtgccgcctaagcctatccacacctccttgtatcgtctggacgaatcgttggactggttgatggaaagtatctgcgacttctccttttccgtcagccccagcaatccctgtatctggtcgaagcggttcatgaacttccgctggtcgagcagtatcttgcagtccgagttgttgatgatggactccttgacgatgggcgagctgatgatgtcgtccacctcctgcgtcaccactattgcctcgccgaaatactttctgaccgtcttataaagatactttacataggaagccatattcgccgaagcaatcgccttccaagcctcttcaattattatcatctttctgataccttgcagacggcgcatcttgttgatgaacaactccataatgatgattgtcgtaaccgggaacaagatggcgtgctcttttatctggtcgatttcaaagacgatgaaccgcttgtgtagcaagtccagttccttgtccgaattaagcaggtaattatattcaccgcccttgtagtacggctccagcacattcaggaaactggcaatgtcaaagtccttttcacgcactttcttatcttccaataccttgcgataatccgtgtctataaactcgtagaacgtgttgaagcatgggacaatgctgttgtcttccttaatacgtcctatgtactgcgacacggcattggaaagtgcaacctcctccgcacgggtagcaggctcattgtccttcttccacagcgtcagcaacaaagtcttgatactttccctcttttcgatgtcatacaccttgtcctccgtgtagaacggattaaaggaaatcgggttgtcctccgtataggtataataaaccccgtcctttcccttggtcttgcggtgtatcatctcgcacagcccttggtaggagttgcccgtatcgaccagcaccacatgggagccttgctcatagtattgtctgaccagatggttcatgaagaacgatttgccgctgcccgaaggacccaatacgaacttgttgcggttggtcgtcacgccgcgcttcatcggcaggtcggagatgtcgatgtgcaggggcttgccgctgatgcggtccgccatgcggatgccgaaggcggacggagagtccttgtagttggtctcgcccgcgaagaggcacaccgcctgctctatgaacgtgtggaacgactcttccgccgggaagtccgccgcgttgccggggatgcccgcccagaacagcgtcgggcagtccgtcgtgttgtggcgcggcacacagcccatgcttgccatctggctgcccacgtcgttcttgatgcgtttcagctcctccgcgtcgtcgctccacgccatcacgttgaagtgggcgcggacggacttcagcccctgcgagtgcgcttcgttcaggtattcttcaatccactcgcggttgatggcgttctggcggctgtaccgggagagcgactgcatgttcctcgccgttttctcgaagcggcgcagttcctcgtcgctgttgccgatgaagacatactggttgtagatgtggttgcagggcagcagcagtcccagcggcgcggcgaaggacaggcggcagtccgagcggtcggtggacagcctttcgtaacggcagtccgtggccaccgctgcgggcaggtcctccgtgtccgacagggtgtgcaggcacaggcggttgtcgccgacgcgcatttcccttgccgtcatctcgatgtcctccagacagtccgcgttgcccagcgacagggcgaagtacctgcctatgatgcccgtctccttgtccgtgcctgtaagctcgtcatcggagaggcggcgcaatttgatatgccccgaatcgttcaggatacgcgcgaactgctccaccgcctcgatgaacttcaccgccgtctccttgtcctgtatttctttcggtacgatatgcccccggcacagcgtattccagttgctctgctgcctcatgcgctccttcgtagtcttcgtcaggaacaggtagcacttgtggtgcaggaacgggcgctcgttgaagtgcatctcgtagctgcgggcgaggaagcccatgccctccttgccgaggtcggggcggtaccgttccttcacgtaccagtcttgcttgtgcagcaccgaatggtcgggcagtaccttgattgccttgcaccacgtggcgtggatgccctcgtattcctccgccgtgacggtatagacctccggaagctccacctcgaaggcggcggtgatgtccgcgtctttcgagacgatgcacccgtgttccaccgaaagcagggggaagcggctttccagcgtggtggctttcatgatgtttctcatacgtttcttcctttcttcttttttcgtcttaacagattggacacccgtctgcggtggagcacatggcgtgggcgcatccgtgccgcgcccaacttcatcagcccgtgttcgccgtacttcgcgttcagccggaacgtgagccacacgagcgacgaggcggataccgcgccgaagccgatgcagagccactggcccgcgcctgccatgtagaggatgatgaagaggatgaaggcggcgagcagcccgcccgcgaacaggaacaggtactgcgccttcaggcccttgaactccaccggacggccgatgcccttgttgatggggtactcagccattgtccttataccttattatatatgtataggatacccgtttgttagaggaagaacgagcgcaggatggtcgcgcttacaatcaggaagatacacgcgccgaaccagcttgcggcggtcttcgaggtgtcggggtcgccggcgctgaatttgccgtacaccttgatgcctccgataagcccgacgaccgcgccgatggcgtagatgagtttcgtcgccgggtcaaagtaggaagtgaccatgctggtggcttcggtgatgcccgccatgccgttgccttgcgcgaaaacttggatgttggcagccagcaggagggccgcgaggatgatttgctttttcttcaatgtctttgtcataatcttttctgttttgtgcctccgggttggatgttcccattggcggttgatacttgttttaattcttgcggctttggatgaagccggcttttgggatttagtggtctcggtggcaagccgatggtttagccgtagtcgattttcttttttcgcattgctgttacgtttttacttgttatacatagtcgcggatgttgaagtcctcgaagttgtccggaactgcgggcgctttcttgggcataatcaccggtgtagtgtttgcctgcgccgccgacacggagtccagatagtagtccatcagctcgtccagtttcctgcgggtcgcttccgaactcttttctatcatcgcgaacagttcgttgcccttcatgtcgcagaacaccattccggcgtgacggcgttcctctttcgtggctttcggtttcttcaccgtccgcatggcaaggtcgatgtcctcgaaggtcatgcctcccgcttcatgaggctcgccgtcatcatctccgtcttcgtcatattccgccccgatgtcggaaacacgcttgtcggcaaacacctcgtccagttcctcgtcgggcacttggcgcgacggcctggctcccgaaagccggctattgggggaggcagtttcatcgtcaaaggccacgtccttctcgtccacctcctcgccgggggcttgcacggtggcattggacatcggtgcagcagcctgcggttttcgttcaggcatccggaacaggcttttccccatgatgtcgccggacctttccggtgcgcccacatccttttccttgtcctccttgggtacgttttcttcccggcgttcccaagtcaggtagatgaccatccataggttgaaggccatcatcagcacgatgagcagctcggccatcgtcagagcggttgcgaggtttcacggcgtaacagggcattgatgtcgtccccataggtttgcaagtgctcttccagcacattctcgatgtacccgccaatggtgctgccgttcccgcccagtgtccgcacaatgcgggacagcttcccgtgcatctcacggctgaggtaaatgcactggcggtgcgctccttgtctgggcgtcagatagcggaggaacaccgccgctttttctaattgggtgtcgtccacaatgtggatgactacgtccgccttttccagattgttcacttggggagtgtccgccttcgggttgccattccccttctttttcattctcgaattgaaaaatcccatcttgttttcgttttttagggtgaataaaatcaataaatgtcctcgtaatttttcttgtaaagtcggcggatcacttcctcgtattcgcggaagtgctgctccagcacacggtccacatagaccgacaacgtaagcccgttcttcccgatgacctgcacgatacgctgtatccgctcgtggtagcttttgcggatgtaggcggtcttgcccgaacacacggggattctcggtgcatggaggaagcgttccaggtattcctcttccttttccgtggcatccttgcccacctttgctttcggtttttccgccagcctggcctcctttgcggaagtgttgccatctgttccgaggctccccggggaggcgggcgcgggcatttccggacggaacgaatccaggaacttgccggggtcaatatcgacatcgagtttcttggccatcggttcaacgctttacgatgccgagtatttcttccgcgagggcatcgatgccgctccctttcgccaatgccttgtccggcggcagcagcgtggagcggaaaaacgggcggtcgccttcctcagagccttccttgcggaaacgcttgctgtcgggcagactggtgtccagcacttcaagccccatcccggctatcaccttgtcatagatgtcgtacaggtcggtcttctcgcgcttgtccaccatgttccacaagaggcggatgcccttgatgttcgacttgccggtagtgatcagcgtgtcgttgatgacgcccgcgtacttcagcgagctttccatgatgaaacggtctgcggctatcgggcagaagatgtagtccatcgtcgctactgtccggatcaggtcgaggttgttcaccgtacccgtcaggtcgaagaagatgaagtcgggcggtgtcgccgactcgacaaatggcctgaccgtttcaatcgcgttgccgggacggctccccacaatcgggtaggcgcgtttgccgatgcgcttgaactgctcgtatgccagcttgcgcaggtacgggttgcgctcgatacttttcaagtcgcgttcgcgcatgtccttgatgctgaactggggatagtcgcagtccacgaccgccacgtcatatcccttcacgtaatacaggtaactcgccatcagtacggtgagtgtcgttttgcctgctcctcccttctgggtggagaaggcgatgaacaaaggttcttttttcatgctttcttcttttttatttgttagacatccgtttcttggtccggtcggcagccatccgcccggtaagcgagcaggcagtccggcatccctcccggtatgcctgttcccatccatgcctgtgtgccggcaggcaagcataagggcaggcataccgaccattccgcctgcaaaggaaaatgactttcgccaaggttgtgtctctttgctgttgcgtggcagcatttggcgttgtcgtggcagcttgtggcgttctttggccaccctttccaccgcttttcctggcgtttggcccattgaaacggcatccgccctttgcctttccaccaagcctttgcctgtatgcctgtgtgccggcaggcacaagggctggcggactggcaggcaggttggcaaggatgtcagcccggaagcaggcaggcgtgccgaccgtttcgcctgcaaaggaaaggggctttctcaaaggttgtatccttttgccgttgcgtggcagcatttggcgttgtcgtggcagcttgtggcgttctttacccggccttatcgccactcatcttgcgtttggcttgtggccgttatttggcattttcaccattccgatgcctgtatgccagcgtgccggcaggcaggcacaagggcaagcagactggcaggcaggtgaactggcaggcgggcaagaatgcctgccacctggcaaggaagaatgctagcttgtaggttcgcaggcatattggccacaaataggtagaactttttctattgtggccaatgtggactcatgaacatcttaattcattcctaccaatcgctttccaatagttttcttgcttggctgattttcgctctttggcatttcagcactccaatgcctgtatgccggcaggcaggcacaagggcaagcagactggcaggcaggtgagcaggctggcgggcaagaatgcttgcggattcgcaaacatattgactacaaacatgaagaactctttttcacttgtgctaaatgtagtctcgtggacatcttagcacattcctccatcgctttccaacagtttctttgtttggctggtttatgctctttggcatttccccgctccaatgcctgtatgccagcgtgccggcaggcaggcacaagggcaagcagactgacaggcaggcaggtgaactggcaggcgggcaagaatgccttccggttcgcaaatctgaaaacggacaggcaggcaactatgtttttttcacttgcgtggcagcatttggcgctgtcgtggcagcttgtggcgtttttgagccgtatttcagacttggaaaacaccctacctttgcacccaagcggcagggcaaagccgaaagcgcgcaccgcagaccccggctccgtccttcttttgggcagcagaaaggtatcgggcgaccgatgccttataaatgggtaatggcaggtctatccccaatccgtttaccacggatttttgtgtcctcaaagacacagcaaggtgtcctttgagtaactcaaagggtttcgggttactcccgaaacgaccttgcccctcacggggagggcttcctctccgaagtcgggaagcctgtttccacctgcggtgcggttgccgaagctacgcttatgccgtgacaccactaaatccattgtaatatgaacgagaacaagaaaaagaacgggactgacagtcccaagtgggggcggcatccacgggaaagccgcaagtcgcactgcgtgatggtgcgtttcgacgacggggaatggctcaggttcctcgctatgcacggcaagtccggcgtggaggcgagggcggtgttcctgaaggcgcacttcttcggacagccgttccgggtactggtcacggacaagacgctgctcgactactgcacgaagctgtccgctttccatgcgcagtaccgcatggtggggaacaactataaccagacggtcaaggagctgcgctgccatttctcggagaaaaaggcgatggcattgctctacaagctggagcaatgcacgaaggaactggccgcaatcacgcggcaggtcgttgaactttcaagggagtttcaggaaagatggtcgcaaaaatcacggtaggcacgtcgctgtacggggcgttggcttacaacggcatgaaagtgaacgagggcgaggggaagctgctcgccgggaacaaggtcttcgacgatggcagcggacgggtggacatcgcccgtgccgaacaggatttcaaacggtacatgccggagaacgtccgcacacggaacaaggtcatccatatctcccttaatccgcatcccgacgaccgcctgacggacatggagatggaaagtctcgcgcgggagtatctggagaagctgggctacggcgaccagccttatctaattttcaaacatgaggacatcaaccgccaccacctgcatatcgtctccgtcaatgtggacgagaatggcaggcggttgaacaaggatttcatccatcgccgcagcaagcgcatcaccacggagctggaacgcaagtacggtctgcaccccgccgaccgcaggcagcaccgtaacgacaattccttgcgcaaggtggatgcctcgcagggagacgtgaagcgtcaggtgtcgaacaccgtcaaggcggtgatggctacctacaagttccggacaatgggcgaataccgcgccttgctctccctctacaacgtcactgtggaggaagcccgtggcatggtgaacggacgcgagtatcacggactggtctattccgccaccgatgatggcgggaacaaggtcggcaatcccttcaaggcatcctgcatcgggaagtccgtcggctatgaagccgtgctgcgcaggtttgagtatcccaatgcccaaatccgcgacaagcgtctggcggacatgacgcgcaagaccgtcgctgccgtattggacaggacgtaccgcaaggatgaatttgtcgccctgctcaaagcgaagggcgtggatgtggtgttccgccacacggacggggggcgcatctacggggcgaccttcatcgaccaccgcacgggctgtgtgctgaacggctcccggctgggcagggaattttccgccaacgccttgcaggagcacttcactttgccgtatgcggacacgccgccgatgccgttcacccttacacgggacgaaccgcaggcggaagcccatacctatgtggaacacggcgagagccattccacgggcttgggcttgcttggcggcgacgcatcgggcgcacaggcggaagaagccgccttcgagcgcgaactcaaacgcaagcggaagaaacgccggaagggtttgggattataaattatccgtccgcagggcatccaagcaaaggtcagacctttggctatctaaggtcagacctttggtagcctcacctcggacttgagataggctcaggtcggacttgaggtatgcttatgtccggggaaagccttgcggacatattgttcaacttaaaaacagaaacagatttatgtcacaacaggaagacgatttgagggcgttggcgaaaatcatggactttctccgcgccgtgagcattattctggtggtcgtccacctctattggtacgggtatgaagccgtaaggctgtggggcatcgacatcggtgtcgtggaccgggtgctggtcaatttcgaccgcaccgccggactgttccaccatatcctttacacaaaactttttgcgctgttgctattggctctctcttgcttgggtacaaagggcgtgaaggaggaaaaaatcacgtggggcaggatttggacggtgcttgccgcagggctggccctgttcttcctgaactggtggatgctctccctgccgctgcccgtggaagccaacgtagccttctatgccgcttcgatggcggcgggctatgtctgcctcctgatgtccggcacgtggatgagccgcctcttgcgcaccaacctcatggatgacgtgttcaacgtggaaaacgagagcttcatgcaggagacgcgcctcatggagaacgagtattcggtgaacctgcctacgcgcttctattacaggaagaagtggaacgacgggtacatcaacgtggtaaacccgttccgcgcttccatcgtattgggcactccgggcagcggaaagtcgtatgccgtggtaaacagctttatcaagcagatgattgaaaaatcttactcgatgtacatctatgacttcaagttcagcgacctttccaccatcgcttacaaccacctgatgaaccacggcgacggctacaaggtcaagccgaagttctacgtcattaacttcgacgacccgcgccggagccaccgctgcaatcccattcacccggatttcatggaggacatcaccgatgcctacgaaagtgcctataccattttattaaatttgaacaaaacttgggtgcaaaagcaaggcgacttcttcgtggagagtccgattatactttttgccagtattatctggtttttacggatttatcaggatggaaagtattgcaccttcccacacgccattgagttgctgaacagacgttatgaggatgttttccctattctcaccagctatccggagttggaaaactatctttcgccctttatggacgcttggcagggaggtgcagccgagcagttgatggggcaaatcgcatcagcgaagataccgctctcgcgcatgatttccccacagctttattgggtcatgtcagacagtgagtttacgttggatattaacaacccggatgagcctaagattctctgcgtcggcaataatcccgaccgtcagaacatctacggcgcggcgttgggtctgtacaattcccgaattgtcaagctcattaacaagaagggcaagctgaagtcggcggtaatcatcgacgagctgcctacgatttacttcaagggattggataatcttatcgccactgcccgaagcaacaaggtggcggtctgcctcggctttcaggacttttcgcagttgaaacgcgattatggggacaaagaagcggcggtcgtgatgaacacggtgggaaacatcttttcgggtcaagtcgttggtgagaccgccaaaacgctttccgagcgtttcggcaaaatcttgcagaagcggcagagcgtcaccatcaaccgggaggacaagtccacctccatcaacacgcagatggagagcctgatacccgcgagcaagatttccacgctgacgcagggcatgttcgtgggcgcggtggccgacaacttcaacgagcgcatcgagcagaaaatctttcattgcgagattgtggtggacgtggagaaggtgaagcgcgaggaacaggcttacaagcccatccccgtcatcacggacttcaccgatgccgacggcaacgaccgcatgaaggaaatgatacaggagaactacaaccgcatcaaggcggaagtgcggcagattgtcgccgacgagttgcagcgcatccagtccgacccggaactgcaacacctcttgcagggcaagtaaaaacgccataggcgaaaaaaggaaaatccttaacttggctggatgttcagaccgggttaaggattgtccttttctcgttgattgacaattgaaatgaaaattactgcattggtttctccgttttatacagcagatggggcatttcttttccattgtatataatggtatggctgccgcaaggtttcatggcaatggcttccgccacacggatggaggacgtgttttcgggacggatgctgcaatagacctcttgcaagcccagtttctcgaaagcgtaccgcaggcatcttcgggcggcttccgtggcatagccgttgtgccaatacgcattgtccaggatgtagccgagttccaccgcttcattcccgtttatcacgcttttcatcagcccggcctgtccgataagtttgcccccgtctttcaacacaagggcgaaatacccgtagccgtccttgcggtaacgggagaactggcggttcacccattggcgcacctccttcttgtcaaagccgtgttcccatgcgtacatgacttccgacttgcccatgagggcgagcaacgcgcccgtgtccttgcgggtgattttgcggatgacgagccgttccgtttccatgatcgtgagcgactcggcgtaggtctttatctccaagccgtcgtctttccactccttgaccatcttccggacggtatcatccaccagcctgcggtaggcgtcatcgggaacggctttcaagtaaaacgtgtcattggtttccttcaacacccaatcggctatgtcctgcaagtccttcccttcggggatatagtccttgtgtatcatgtactcgttgatgttgtcctccagtagttcctccatggcggtacgggtgtcttcctccaattccgaaaacggggtttccgctacctgaaaaatgtcgttgttccattcatccgcttcttcatcgtcctcttccggcacaaaaacgccccgtttcatgtccagcatctcctgcgcgaattttcccgactccctgtccttgtacttcttggcatatttttccagcagttcccagtcctgccgcctcatggggaagcggaacgcggcgcgttccacctcgttgcagcgcatcatgtccgcctgttcgtcctttggaagcgactggcattccttgcagatgtgcagcgcgtgtcctctgcccgagaagctctcgttggacttgtggcagccgcataccttgcagtagtgtccgccgtgtttccttttcttcttcaccatgttactcacccctttccagcaaagcctttccttgttcggtgagcctgtatttctgcttgggatgtttcggctggtcaggatagagcggttccaccaatccggcttccatagacgggttaaggtaattgcccaagaaattctccctgtccttcagttccatcattcccatcatttctttcagcgagcaagtgtgttcccctatcagttcaatgagccggacgatgcttgtcgggtacttgtcgggtgcttgtcgggtacttgtcggatgcttgtcggatgcttgtccagccgtttccatctcatagcggaataccacccatacggaactcccgtccgtgtggaattccgggtcgggtatgccggcacggcggcactcgtctatcatcaggctgatgccgcgaccccagctttccagcaactcgcttttgtaaagcacgttggctatgatgaggttgggcggctctgaactgtgtccgccaagcagtttttcaagggtcatgtcgggagggaacgcgccgctgctctctatttccacgcggtcgtcataaatggcgatgcccaccgaaccgcccggacggtggtaggctctgtgacaaaaggcgttgatgcaacattccctcaatgccttgtaaggtatgctcagcttttcttcacggtacagcccctctattttacccgacaaggacaggtgcttgaaaaaaaacgacatggcagcgtccaatagcgcgtagatgttcccttgctgtctttggttgtctatgaattcctctttgcttgtgcctctgaaccttgccattcgcaacaggcattggggatagtcgtacagattgcgcccgaacagtacggcggcggcattgttcagcttcccgtcatgcaacaggtcgaatttttcaaggatggcgggtatttcttcgcgaatggtggtttccggcaggcgtccgcagttgattccggcgcgtaccgcaccgatgatgacattctcgtcgaggtcgctgatttgcaggtcggggttggggattgcctcccaactgtatttgccgcccctttgcatcagcaggtggttgtacttgtcctgcggcatgacagacgtcacgctttctatccgctggtaagccctgcctttatatgtgaacggacgcatatagcgttgttcctcagcatataaggcaatgacctgtttgtccgtgtcgggaatgtttgcgtatgagaccgttatcgtggcaaacggctcgaataggcggatggcttccgcaatttcccgtttcgtcttgtcgctcacttcctgaccggtgattttcccgttgtcagccacgccgaacagtaccgtaccgccctcgccgttgaggaaggcgcacagtgtctccatgccgcgctccaactgcccggtgatcagcttgtattctgtccgtcccccttcatcgccggaggccagtttgcgtatgtcgtctatattggttatattcatgcgtaatcgtttggagggcaaaaataatcatttgaccgacagatacgaaattttggagcattttcttgcaaattgtcattgctagaacaggaaaaagaaaccgggagcaaggggcttctacccatacaccttgttcccggtcatgaatcagacagaaaaactttcatctcttgcgtgcccgttcccgctcatcgtctttcacgattcgctcgttcagcttttcggaagcccggtcgaagaaataggtacggctgtcatttttccgacgacggatatccacataggcgttgtagcactgactgggcttcaactccatgccgaagaatcgggagaaatggaccatcagttcctggataccggtttctccgccgttgatacatttcagggtgtcgagcccgtacaataattccactaggtcggatatgctgcctgtccaacatatcggaggggcatcagaaggaggggcgccggttttctcgccggtaaacatgtgggagggcggcaacggatggtattcccgggcaaggaaccgtagcatcttgcgcacaaaggcaagggccttgtgtacatgcagattcagttcgctctcatggctcctgccttgcagggcctcatggtattgcagctccgtttccgcatagctcagggcgtgtaccggatgtccgctttcgggcgggatgagacagagttggatgaccctttgtgtaaactcatcgtaggccgtgcgtaacccggtgcggctgtcgggattgcttatcagacggaaaaactcggtttccgtcaaggtgagatgttccatttgttcctaattttttgtttttactcggatgaaatgtgcgcacatacatccataggagcaaatgatagtccaattacaatgttatggtgatgaacttgtatgcaatttcttgcaaatcaagctcttggcagacgaaaatttgttttaaggaagaataggcagcctccttcccgtgtccgacttccggacaggtgtccgtttttcgtacacagtaccgccctttctttccgcttttttccattccgtttcgtcctttcccctgccatgtcacctcttcgtctgaatcccatacaggtccattttctcgtacagcgtgctccggcttatgcccagcagtctggcggcctctttccgattatgcccggccttttccaaagcctggcatatccgcttcttttccatgcattcccctttcaaggcaatgtcaggatcggaaggctttccggactcatccaagttcaattcttccgccgtcaccaattccccttgggcaaaaagcacggcggattggaccgcctgtttcagttcccgtacgtttcccggccagtcatgggccagcaaccgtttcttcgcctccgcatcgaaaccttttacctgtctgccatgctcttggttgtaaagttcccggaagaattcagcaagcggcaggatgtcttccgggcattccctgagcgggggtactttcacggtgtactcactcaatcggaaatacaggtcccggcggaaacgcctttccgatatggcttcttccagattctcgttcgttgcggtgatgatgcgcacgttggctttcctgtcttttgtgccgccgacaggacggtaacgcctgtcctgtatggcgcagagcagcatctgctgtacgccgaggggaaggttgcctatctcatccaggaacaacgttcctccctcggcttccgaccaatagccttccttgcgcccgaccgccccggtaaaagcccctttttcatgcccaaacaaggcggaagcggccagactttcggataacagcccgcagtccactgtcacgaacggtttgtccgcacggtcgctttgggcatgtatcttttcagcgatatgtttctttcctgtaccgttctcaccccgaaccatcacgcagatgtcggctttggctaggacgtggagacgtccgaatactttctggtaggcttcgctctcccttatgaacaggggttcctcatggaatgactgccttttctgcaagtcttggagcatggcgggaagctggctggtcagcagtttcttggggatatagtcttccgctccggatttcatggaacgcacggcggtaggcacttccgcataatccgtcatgatgacgtagggattgtgcttcccctcgcggcgcagttcttcaagcaacaggatgccgtcaccgtcaggcaaccggaggtcggcaagcacgatgtcgtcatcttccagcattgaaaacagtttccgggcaccggtgcaatcggaggtactgactgtccggtatccgttttcttccaaaaaattgcagacatacctgctgtacacaaggttgtcttccactacgattatctttcccatttcttcatctcctttctggcggcttctatgatggtttctccttgttccaacacggcacgggctgcataggcgacttcttcgtccgagtacggttccttgtggatggcttcgtgcaacttctgcaaggggcgttccgtccgtatcaccatccatgagctcctcaaatggtgtacccagctgttcaaggctgtcaagtctttcctttcggatgccttccggacttcctctatctctttctccgtttcggcaatcagctgctccaatgttttccgcttgtcgccgaaagccaacagggcggagaagtccggctgccggttccctctttcacggatgcagtgccgtgtcgcctccatcagttcgtctatggaaaacggcttgggaagcaatccggaaaatccggcttctttcagttcctcctccgatacatagccggccgcagtagctgccacgatgggaagttcacgggaattgccgatgtcggacatgcgcagcagttccagaatctcgtagccgttcgcttccggcattctcaagtctgttatcaacaggtcataatccttgctccgtatcctgtcggtcagctcggccaacgtaaggcagttgtcgcatgaaacgccacattgaaggtacatctcgcgcatcaggcggagcgtcaccgggtcgttgtctatggccagcacggaacatccggccagtgaaggacggacatccattgacttctcttcttccggtacttcttcggctttcggcagcggcaggacaacggtgaagcggcttcctatgccaggtttgctctgtacggaagcagaaccctgcatcagctgtacgagattggtcacaatggcaaggcccagcccgaagccgtcctgagtcacagcattgcccagacgttcgaagggggcgaaaatctgttcctgcttttcttccgggatgcccgtcccggtatcctgcacgtacaggatgaagttgccgtccttatagtccgtgcagagtgtaatgcgaccgctgcgggtaaacttgaccgcattggagagcaggttgcttccgatgcgcaatatgcgctccttatcgcctcccagcacttctgtcgtctggttgtcagtcacgaattcgattcctttggcttcagccaaaggggcgaactccgtttccaacacagttgctattgactcggagcggaatggacggatatgcagcttttctttatggatctccagcctgaaaaattccagcagctcggtggtcatggaagccatgcggctggcagattcacgcacggttaatatgtggcgtacccggtcttccagggcttcatcccggagcaggagttctgcattgccgcttatcgccgtcagggccgtgcgcatttcatggctgacagtctgcatcaggttgtgacggaattgcagcaattgccggttcttctcattgctcgcctgcaattcgccgataagttcttcgcgtttctttttttcgccatgattgcggcggatttcccggtggatggcgatgtggaacaggattaaaaggaggatggcggtggacaaggtagaggtgagcaggagcgtggaacggctttgcgcttccattatcttatgctcacgctgaaagaaggcttcctgcacttgcctgtccagattcttgatgaggtggttcagccgggcgttcaatgccagattgcgggcgtacaggctgtcggcactggtttccatatcctccgtcccttcctgctgcatggcaatcaggctgtcactgaatgcgtgcagttctccggcggaaggcaaaacccggacggttttcttggcgcccaacgctcccagtatattgtcccttcttttcctcacggtgcgtatgcgggtggcacgttccgccactttgggcagatggtggacaagcagactgtcagcagcatcctgtatcccgatggcttccacgacacggaacaagtgcatttccttgtcggcaagcaggtgccggagcgtgtctatctgttcgggacgtacatgctgcctgcaccggggcttcaaggccagcagcaggctgtctgtggacagccgtttctggcgatagtttgccgtatctgcattttcttggctgatcaggctctcgcccagcagggaaagctcggtgatgtgaaggtgtgcggcatggatgtcattccgtaccgattgcaggtcatgcacttcgaaatctatctcccgcatccggctacgctcacgaaagaggataaccaccattccgactatggcggccagcaacaggaagttcccggcatatatcttttgtgtcaaggatactttcattgctagtcatattatccgtagtgcattctctcatcagaatgtgctacctcgtttatgggcaaaaatagaaattatcaaccacaatccatgcgaccggttcagagtttatgaataattatttttttagaacgattcaaaacaaattgagccgcaccatgacgggtgtttgattgtaaaatagtcattgggattatgcaagcgtaacgcaggcatccgaacgaacggatattacaacatccggcaagagtgcagacaatgcaaaatgcacagagagtctgatagacaatgcaactacttgcatacaggtacaacaaaacaatggcgactacaacatttgggttcatagttgcagtcgccatttcacatgcaaaggttgtacctgtggttcccgaaaacttacgatttctttcctgcttcggatacagctacaaaaatagccgtcctgattccgggcggctattataactacttgcaggtaattgcagacagtgctttttaatatatctgtctacaaggtgagaaacaacaatcaattgtcactcgtccctccattatggtttctgttgtaagaggttgtcacgactgccacatcaccgtattgtcttccactgacggaacggttcaatgcggagacggtcaaagtggtcacttgttgagtacctgccacgtgcaaggccgtaccgacgggcaaggtcacattgatggggtaagttcccgtagccgtagtgacacctgcgccggcaatgcgggccagaatctcaatcaggtaagcggttatccgactggtcccggacgaagtgatttccgttccgatgtgataagtgaacgaggccgaaccaacggtcatgtcacccgatccatacaggttgtcccacaggtcttgttcaaaggccaacggcgtgcttgtggaggaagaagtcacatccgctccaaagagcaacgtataggaagtgaactggtcggcaaacacgattacttgtccgccttctacagtatattctgcatccacccattgcccgttcacgtatttctgtgccgtgatggattgcgccacttccgcatccacatcgtaagccaattcgatgggacttgaaagcgtggcgttcgcatcggtgcaagccacgcttgtaccaatcagcatgacgctttcggcagcacgggaagtggcacgggtattggcttcggcttcatccagcgtgtaaagcggggtaaccacgatggaacttcccgcaggcaattccgccgtctcgggtacggtgacagccactgtgaccgcgccctcgtcattgccttcgatggtctctgaagtcacgttggcctccgtatcgccgttggcggctacttcaatggtcgtgccttcattgggcaatgacacgttccatacgacattggctccgcttccgctttctgcaacggtgacggttgtttccttggactgtttccccggagcggaagccgtcagggtataacttccggcatccacatcgtcaaaagtgaacgtgccatctgcgccggtctgtgtcgattcgccgttcatgctcacggtagccgaaaggccgttgccgtccatgccggtgacacgcccgctgatactgtgcgatacggacaccgtgggcggcgtcacgttgctgtaatccggatcatcgtcactgcaccctacgaaactggtgcacaaagccacactaaggaatgcgaacattccccatcttgatagatttctaagattttccatttctaaaaataattaaacgattaaattaggttattttgaaattctgtattctagtagttatatccgtattgtttgtgtcttcaatcagggtgggtcttgcccaacaggtttaacttgaaacacaggccacctgtgaaatgtttcccattctgcaaggttgcctgcaaaaagaggtgtttccacaacaaacagtctgcgccgatgttgatatcgtcaccggtatattctatcgttgcccgaaggtttctggcaaaggacgggcgataggtgataccggcggctatgccccgccatttggcattgaaatccgatgtaaaatagcggtaggtcaaatgaaaaccaaattcattccgcctgtacatgacgtgtttgctggcggctatataataattctggaagtagtcgttgaccggatatttgccttcggcataggactcgttcaccttgctgccgggatcctgggtgcctatggcaattgcaggccaccatttgccttctttcagcggacgcactttcaggtgaaagtaccggtctttcttattatgtccgacatggccatcgttgtcaatccccttcagtatggtacagacatacgctatttctatccaagggaagggggtgatggccagaaaatggttggtcgtgttgaatttctctccttcatactggtaggtgtcaggaagaaattcctgattcaggaagaagaaaccgatacgggcttctccctctgtcgccatttccgccgtgggcacgtggatcatgccggtaacgcccgaatactcttgcgccctcaatatcggaatgcagcccatcacgacaaggaggccaatcaataatcttctcatttccgccctccttccttttccgagaagtccggcttcatggtgttgctgccccattgcagggcattgcggtcaaaccagccctcgcgttcgttctcctccgggtcggtcgtgtacattttgttggcataggcgtcaccttccatactgtatgtcaggcggaaattagaagccggacggaaattgacagtgcgccgtttccgcttgtaaggcggtatcatcatcaccaccttaaaaccggcattcttgccgccctcgttgctatactcgccgtacaatccgaccgtacagtggttgaaatgccgcatggcttcaactatggctccataatcttcatagaggaaacgtccgccccttgcgcggaactgcgtattccatttgttcagatagacatcggtgcccagcaaggcggtaatccgtttgggggtacttgcttcccagtccactgccattgaacaatagccggttaatccagcctgcacttccaatgccaaccagcggtttacgacatacatccctttcaagtccaatccataccgctccctgccgaacaagccgccgcttgctttcaggaaccaccgggatcgccaatgcgcctctttagataacaccgccatgttcaaccgtactttcttgtatcggtcgccatagtcgttatacaccggcactaatgcctgtgctgccgcctgccaccccttgcccatgttccatttcacaccgggagtcagattcagcaaaatctcatatattttcccattgtgaaacaaatcccggtagttgaaatccgcccctacaaatatatctacctgaccagcgggtatggacggctgtgcaattatggatgaatacccataaaagaccagcatgaatagcaaaatgaacagtttcttgcttattctctcgtaagctttcattttttcatatacgctcgtaattgttttattgttaattgatgtcatagttcatatcccggtcatctttcatctgataccttttaccacattttctacgaaacgcaagtttctcttcatccttttaacccaatgtgagccatcctgattttactctaagatggctcacattgaaacgacactcgcacaaagtgcctttcagtctttcaccagaaaagaggtgaaaggtttatttttcccaatcatttattcacactttcattagtccaaatataatccttcatgataaaactttgttttagcttccaccttaggtcagtttacaaggaactacacgcagaccgtgaaacgggctgctgacaacaaacggcggtatgctcccggagagggcagcataccgcctgttttgttgtctagggtttccaaaggggtgccccctttggcacacgactttgcttgcaaagtgtagtgtgttatacctgctggcgtggctgacagaggaaacggggtgcggtgcttcttgcaccccgtttgctccggcaggaaaacaggctgaatttttgcgaatgggaatgagcaaaaaatcggcctgttttcagagaacggcggcaggtatatgaaagcccccgtccctcgtccttcgctccgacttgtggacaaagtgtcccgaagtgtggccacactcccggaaaagtagcaggacagcaggcaaccgtcaaggctgaaatgaacgggtttgcacccggccttgaccgccgcccgccgttccgctgaatgggtgaacaaggcggccaatccctcaaagtgcttggccgctctctttttgattttggagcatttcttttcccaaaattgaaatgggcggggaagccattttagggctttcccgccttgattaccctttagcaaagacgggcggggctgtcaacggcggcgcatgaaatgcgccgttcatcttgaccgttgactggctcggctggctttgctatttttatcgaattgcatattggtaaattgcattgatatgtacttgggttgtattcacgattggcacattaacatcttcgggctttatggcaagtggcagctccgtacaggcgagaatgagtgcatctacattttctttttcaatgtatttatttgccagtgcaatcattttctctttatcactaggaattactatgccattctctaaattggggtatatcagttttcctaatagagatattattttttcgctatcgcctttacaagtaacatcatcgggcggcgaagttcatcttccatacccggaatatccatcatctctttaggcggttctgcttcctctacaactttaagctcaaacccattgttcagcaatcccattataatctgtgtaagtgtgtgatgttgttttactacatcacatcctaaaaaatgtgtatttcgttctcctgttataaagtaattatcaatcgcccaatattgcggtttcccatcatctgtataaatccaatcctgcccaactcctgcggtaaaaacagggtgttcgatattaaaaagaaaaattccacctggttttaatgtcctatacactttttgaaatatttccactatgtcctctatatagtgcagagctaaattagatataacacaatcccattcattttctggatagtcatattcctctaatccgctaatacgatattcaatttgatttcctgaattgcgcttttgggcttcctcaatcattttcttacttaaatcgatccctaatatttttgtagctccttgttcttctgcgaacttgcagtgccagccatatccgcaccccaagtcaagaacagattttccttctaacgaaggaaacaaaggttttaattgatgccattcaccagcagcttttaacccctctttatcaatgacaataacattcccttgtgtttcttcaagaattgctgatcgcaaactcgttttccctgaccctggttgcccaccaagtaaaaaagcggttggcgattcaaccgctttttttccttgaaccaattcttctaaattatcatttaagcgattttcaaattgtttgtcagtaaaattgactatatttgccatattaagccactttctctttattcaaaacttgttttgaatagcgattcattgaccgccaatactcatgaacggcttgtaattcttctaaagaataatcaaaaagatttacacgttttgcaagctttaattggtttaataaattgacttccaataattgagagtcatttttatttaattcatgattcaaaacatagtttaatactcgattataaacgcttgccgataattcgttaatgatctctatttcaaatgttttttcataagtaactgccatttcattttcactccttttaaagtttgtcaggtaaatatttccgaatatattcttctaaggctttatccataacttcttttacgtttccgccattctttgctgtttcgatttttataatatggtgcaagtcagcacgaacacgaaccgtcttatcccccataatatctttttttgcactgattggtgtatcatttcgttttgctttttgtgcgcctaaatttcccacaaccactcacttctttctatttcttcttactcttattttatcatcaacaatcacaaatcacaagtgatttgtgattaatcacttgtgatttgtgattctattctttttcgttttctaattgaatgattcgctcaagcatttcaaaaaatacgttctcatacatagataaaatcaatatatcccttttctccgatttttacaacggcattgtaggactttctatctttcgttttgattccttttaccagggtttcttttccctctagtaattcttttacatttgttttggtgagttttttctttctaaaatgttcagctaaagtgaaggtacattcaggataatttgaacaaccataaaacgatttttttaatacaatattgttgccacacttaggacattttcctacaaggggtcccgagcgcttagtgggaatttgtaccccttatcgatacaaattccccgtaggcgctagggacctctttagctccttggaagctgtcagtagtatacctaataatttatctacattccctttagtaacgtgtaactttccaaatttacaaaagcgactcatagaattatttcctcccgttaaataatagataactattaaaaatagacaatacttgctcataagtaacggtacttaaattgtttactttggcgtgtttcattgcttgatgaaactgatttttagtaaacagttgacgatattctcgattgacccattttgaaacaaagtacgtatatagcttccaatatttatctggaacatctgtggtatggcgggtaagttttattaagacactgtttacttttggtttaggatgaaagcattccgctggcagcttaagcaattgctgaatcgagacttgagtgtgcaagagcaaccctagtgttcggtgaatatccaaggtacgcttgtagaatccttctgcaacaatcagatagatgtcagacgcatggctttcaaaaaccacttttttaataatttgtgtgcttaaatggtaaggaatactcccaacaattttatacctctgtttgttagggaattgaaactgtagaatatcttggtgaattaaagtgacacgagtattcagttttaatttttctgacgataagttgaatagatgactgtctaattcaatagacgttacctgtttacttattttagccagtttcgtcgttaaatgccctttacctgttccaatttcgtaaacggtatcggtttcttttaaattcaattgttttattatttggttgagtactttttcactcgttaaaaagttttgagaatattttatatttttgttcatgtaatcactccttcttaattacaaatttttagcatctaatttaacttcaatagactaataacaatgtttggtcttgcttcactttgtgcttgtcggaagcctaaatagtaactgcgttttgcttcgtgtccgtctggcaaccgctcaaattgttcatcaagttctgatacaccttcttcgttatagcgtggatcaaattcttctaaaaagtctgcttcctctacaactttaagctcaaacccattgttcagcaatcccattataatctgtgtaagtgtgtgatgttgttttactacatcacatcctaaaaaatgtgtatttcgttctcctgttataaagtaattatcaatcgcccaatattgcggtttcccatcatctgtataaatccaatcctgcccaactcctgcggtaaaaacagggtgttcgatattaaaaagaaaaattccacctggttttaatgtcctatacactttttgaaatatttccactatgtcctctatatagtgcagagctaaattagatataacacaatcccattcattttctggatagtcatattcctctaatccgctaatacgatattcaatttgatttcctgaattgcgcttttgggcttcctcaatcattttcttacttaaatcgatccctaatatttttgtagctccttgttcttctgcgaacttgcagtgccagccatatccgcaccccaagtcaagaacagattttccttctaacgaaggaaacaaaggttttaattgatgccattcaccagcagcttttaacccctctttactgcgggacatctttgcatattcttcaaaaaacttctcattatcgtattcattattcataaccttaacatctcctattttatccttcggcaccgccgcctccaggcggctccccaacttcatctgctcgataaatgggaattgcaccaaaacaatctaagacaacaatgctgccctacttgcgattttttcttgtactgcggaaacagtttcttgaatggaataattggtcgtatctacaacattcgattcatatattcccagattgcaaaattgctcccacattgtttctaccaattcgatatttgtttttcggtctaactttgagcgttcaacagcccgctttaaggtttcttccttacttgcccttaaaataatataatgcacctcataatgttcccgaacaagagctttccatggctccaaaaaccatggcccgacaatcccatctacaattacatcatatccgccacgagcatatcgctttgcagcttctaaaaacgcttcaatgacaatcaaattttgctcatttgattctggtaaatgcggtggtattgcccctttactcaaataatgataaaagtcatctgtgtgcatatgcacagacttttccaaatctgattcttttgcaacagcagatgccgttgtagtttttcctgtccccggcgcacctgtgattacaataattctaccttgatttatctatattttacctccacaaattccgatttgactatctcttaactcgttttgataaatgaagttcattatcatctacatatccaagtttattatatacagtttgtgcaacaagattttcttgtcctgttagaagttcatattggtgaagtggataattcttactacaataagcctctgcaaaagtaatcatctcactcgctaagcctctttttctgtatgctggtttaacatacacttctgtaatttcaggcatatattcatcatagcagaacgattttttaagctgaacacaaacaaatccaactaacatatcatcttcatcagcaacgataacaacttcctgtttattattcataagggaatttctaatattgtctatgcttgtttcgctctcaccattaaattcatcatttaagatgtttaattgctctgcatcatttactgttgcaattcttaccataattacacctcatcaaattccgatttgttgataactcattatatcataaatctattcactgtatcataaatctatccacttttcaatctatatcacgcaattaacttggaaaggaacaccgccgagcaatgggttatctcggcggtcactcttttactcgttgtccgctccatacgataccgacgacggaattccgttatcatttagatttttctcgatatccttcaccggaagtgaggaaaaatacgcttctcttccctcttttattataagctcgtggcacggcttgtttccggcgttgtcgggaatgcgcgcgtccattatgttcacggctatcatctcgggagtaatggcggctctccctccggcttgacctacgcacaccaccgcgtcgggtctgtattgctccaccgcttttttaagaacctctcctgcctttccaaacaccgtcggcacttcgagctttaaaatttccgcgccttgtatttcgtttttcatcatttttacggcttctcccgcaggattgattttctctcccccgaacgggtcaaagcctgtgaacagtattctcattttatcatgcctttctttgtctgtattctctcaaaatctcgcggcacctgttttgaagccactctgttgtctcagtatcgttttcgacagcgttttcgtatatttccgtcagccctatccgcagctcatagcataaaattcgctcggtatatctcggcaggtgagagtattttctctcccaatacgccgcagttttttccatgcacatgagccatgtccgccaaaaatacgcggtcgcgatgtcgtaaagaaagtccccgtaagccgcgcagtcccagtctataacgccacttatcctcgattttttgcctacgataacattattcgagccgaaatccccgtggaacagcgctctttcttccgggcaataagatataagctcacgatatgccgcgagaagctcgtcgatgagtgagaggttaacatagctcctgcttaccgccgtccagtctctctcgaatacctccgcaagatattctctccagctgtaaaacggagcgtttcccgtatcgctgtcaaacacgccgcagccggaagtgcctgatatatcggttcgcgatattgcttcggttacatccgtaatatcgccgagcagtcgcacaaccgtttcttcatcggagtcctcatatgtaatcccgtccgcttttacgctgatgcagaagtagtgcgtgccgtcaaagttgcctgtttcaacaacctctggaataggaactctatccgagcggaagtgctcataggcgtatttgtcttttttgaagccttccatatttgaatttatgcgcacgacatattctctgccgccacgcgaaaaccaatacgcctgtgactcctgcccttcttttatcggaaaaagccttatatcctcaccgtactttcggcttaaaaactctgtgatgctttcttttgaataatcgcttttcatgttccgctctctcctttagctctgtctgaggataatataccacaaaaaagcaaaaaaatctaagacaacaacgctgccctacttgcgattttttcttgtactgcggaaacagtttcttgaatggaataagtggtcgtatctataacattcgattcatatattcccagattgcaaaattgctcccacatggtttctactaattcaacatttgtttttctgtctaattttgagcgctccacagctcgcttcatagtttcttctttactggcccttaaaacaatatagtgtacttcataatcttctcgaacaagggctctccatggttctaaaaaccacggccctacaattccatctacaattacatcatatccaccgcgggcatagcgctttgcagcttctaaaaaggcttcaataacaactaaattttgttcgttggactctggtaaatgcggcggtattgctcctttgcttaaataatggaaaaagtcgtctgtgtgcatatgcacagatttatccatgttcgattcttttgcgacaatcgacgcaattgttgtctttcctgttcccggcgaacctgtaatcacaataattcttccttggttcattttcactcctcctatttcgatttgctgttctctttttctttttccgtccccgctgtgggtttggatttttcggcaagtccaacttctccgcaatctattttagccgcttcttttcttcttcaaacagtttattataccccaaaaccataaatcagcaaacgcaaaaaccgttaccaaagaaaatgccgcctgccttttttgctaaacctaaagaggctaagttagaagtggacgcactatacaaaggaatactaccatttcgtctaactgcttctgcccattctgcaagtgtgtggaatgcatacccttttcttctgtaaagttcagccgtttcaattcccgcttcctctgcctcaagaataatccgaacactacgacaaatagatacgacttgagaatcttccaaataagcagcgcaaaagggaacatccagcaactcttcaggtagccagggaaaatggtggctcatctgaggctcaatgttgtctttagtgagtaagcaggcttttaactttggctgttcaggaagccaaaaacaagcatcttctgaaatcttactttctcctaatagttgccgatattctttatcataaataggtgattcattcggcagcatcagtactggctctctgttggtaattgattgtagtttttctcttaattctttcggtacgtcagcgcgaaaataagcatgtggtttttcgtaaagtggtcttgtcaaatagaagcggggagccggctgtgaagtggagtcccatggttcccttatagtcataagttcgttcttttcattcattgtaaacagtgcttctacatgaagctgcatatagtacgagttgctttttcccattttctaatattctcctacatttatttctctgcctgttcaatcattttctttactaaccgctgaaacaggtcggcggtttcctcgtccatcggtgcaagctgtccgatctgtccagctatcatcgccgttacatcgtcaatggaaagcggtttttgtttctgttccgccagtgcgtcccgcatggcttggaacatagcggcggtcacagcttctcccagctgttccccgttgtctatgtctttcttaatgtcccgcaggatagccaggatttgttgctcgatgccagggctttcaatgcccgagttggccggaagcagctggttcttgctggtggaattggtgaggtaattgcggatataccgtgccatggaaagctgcgtgttcaatgccagaatttgcgcattggtctcgctgctctgttccatatacatgctggcagcggcctgtacatcgggcagaaggtgttcgctcttgtaagaggagatgttttcatccacattgccaagttcctgctcaatcacaccgagacggtcactaatgaaagccgaggtactaactgcgatttgattcttgtcctttatccagttctcattgtaaacggctatcaccgtattcagcacatcctccgcccgttggatgcacacgtctttgaatgacagattgatgacagtggatttctcatcactcaacgtaactgacaagttggaagcatagtcgcctgtggcatcttggtatcctctgcgtgagacataaacaggtgaatcatgggtggcggaatcgttcgcaacctttacaacaagttttccgataggggcgtcaactgtgtcattcaacacagccgttatctttcctgccacatcttcaccattacgagaaaaatccgtcagaagtacttggccatcaagaccggggttaatggtaaaagccacgctctcgttgtcttgcaattcgttaaagtctaccgtgtaggggcaatctcgaccatacaagactttcttgtaaaaccctccgtccgtgtgataactgatgtccaaatgaaggcgtttcaccacatcaagcattaccgcaggagactgcaacgattgtatttcattgtttacgttggtgttggtctggaagaggtcgaagtctcccatcagaccagccgcatcacccaatgagttccctttggaatcctctttgataaggagcgatgctgaacgggtatataccggcggggtggtcaaaagatagacgacagccactccgacggtaacagccaacgatatgacgaaccaataccacttgttgagacagaggtagaacaaatcttgtatacggataaagtcatccgcctgtttaggtttggatatattgttttgagttgccacgatatacaatatttagattggacgtgattaattaaaaatgaggatggccacagaagtcagcaacgatgccagcgaaatccagaacgaggtggaacgcacgttgttgccgttgacggtagattgacgggctttcacttcattgggttccacatacaccacgtcattctgttgcagataataggcgggtgaagaatagatgtgttcgccggaagtgaggttcagtccgtacacccgttgcacatccccttcttgccgtaacaccatcaccttggaacggtttccgtagatggtcaggtcgcctgccatgctgagtgcatcgagtatggtcagcctgtcccggtcaatgctgaaacgtcccggactgttcacctcgcccaacacggatatgcagagattggcaaattccacggtcacgacagggtctttcaccaaattctcctttatcaattcgttcttgatacattcggcgatttcttcccgcttcattccggccacgtgtatcttgccaagtacaggaaaatctatcttaccgttggcatctacggtataagcggatactccttgattgcttgaagccgtcacgccatttgtccttaaagactgacccaattgcctggacacataaggcaggttgaacaagtccgtcaactgggggtcacggctgttgacgataatggaaatcttatcctccggtcggactgtaatggctttcacttcaggcaacttgatttctgtttccccgggtctcaaatcctggaaataaactacttccttggaagaaccgcacgagcccagtgtcactgtacttgcgacaatgagcaagatgtaaaatactttatttatactcatattcctgatttttctttgtttaagaccttctatagcctgtgtcttgaaatactatggtgttttggtagtgccattcattgaatgatttgccgtcaactggctttcctgtcttgtatatcctttctacaaatgttcttttcatacactccatgtcacctacggcaaatggcatttccctgtcctctacacttgtcacaacaatagggaggggcacacgaaacactttcatcgcattaataaccgatttcgtatagatgtgacaaaggtgaaaagcagaacgttcgaatgccacccaataattatcaacacggtacagatgaatatgctctctattggaacgctcactgaaaagtatgtctgacagatgattctccatcaacttgccaagctctatgccgaacctgttcattgaaattgtgattaaatcaatttataatagcattagttttcggtcgcaagggggattgatttttcctgtttgttagggaaaaatttacaatcggttcatatcctcatggaataagctgaatatactccgcttctacttctatggaggcagccaacaaggtgggcagttccaccagcagcctttttgtcttcgaaccacgtgtggtcaccaatgtgcccgtatatccgtccaactgcccgccgatgatgcggattttccggtttctcatctccggtgtcacctcgtcaggggaatagaacttaggattatcactggcttctaccgccttgatgaaacgttccatatctgcgacagggacgatgataggagtgtgctgtacaccgagcttgtaacggtattgaagcttgggggtactctccacaatggcatcaagatgctccctcgtgtctttcacgaaaagcaagtcctgcatgaaaggcacttcctgatccacccgcttgccaccaactacgaccaaacgatgcaccataggagtgaaacactgcaccttcaagttctcgaacatcttgtaggcgggcaatttggcatgtctgcgtttgaggtcacgcatggcataccagtgcagtttatcctctataggtagtatttcgtccatgataataaatggatagccttacgccttagttggtgaagggatacatttccgactcctccaagtgtttattatatattgaaacacatgtagttacaacggtattatccaaaagttcggggaaattccccagcattatatatgctatcattatcttatttcggcatgacctcaatcgtactttggtagactcgaaatcatgtacattatcggtacatctctccgtaagagatgtatcatgtttagcaattggagataattaggtgatatccaatgaagtataaaatgtaataattacaatttgtcaaacaactgttcgacaaatcctttttaaggacgtattggaaactattcatttcttaacttttttggtatttatcaccgttttcccaacaattgtgtgtaactttgcatgcgaaatacatctcttacggagagatacaccgatttgtcgaacaaatccactttctaccgccaagcctttttcccaacggttttcttgtcgattcgcattttattccccccctaatccgcttatatacaaaggatagctgtacctttaatgaggctaccactacagaatgtacatcgcgctctcaggccttgaatcggtacatctctctttaagagatgtatccaacctgctatttatttgaaaataaacagtttgttaattcatacacttttatttgtcaaacaattcttcttcttttgtcgaacaaatcctgtgggaaggttcgcccaaaacgtaattttcaggattcatcctgtgtggattgcagtattttttgtaattttgcggcgtgcgaaacatctcttaaagagagatttaccactttgtccaacaaaaatccccctgaacgggaaaggttcaaggggaatctctcaacttacaaaatgtgtttgggggtacccaatcattcttatctgccaatagaccggatgaccttgctgttggctttgtccaccaccgaagaatccagtagggccaaatagatgcgggtcgtatcttccgaatcatgccctaacgcctcgctgatgacaggcacgggcacattctgactcttggcgatgctggcccacccatgccttgcgacataaaacgtgagcttgatgggacattcaaccatccggccaatcttttgcaaccgcttgttcatcacatgcgaggcattcaggtattgccgtctttccttttctcccggcaccttgatgatgggaagaaggtaaggagaatccggatttgtgtatttccggacaatttcctgcatgggctgctcccatttgatgcaaagctgttggtcggtcttgtgccgccgatagacaagcacgccgttttgcaaatctttctttttcaagaaagccaagtccacgaaagacatgccgcgaagataaaagcagagcaggaacaggttccgggcgaaagccaaggccggatataattccaaatccagattcttgatccgtccgatgatttctgaggatacgccccttttgaccgtcttctcaactcccgtatggacatggcggaacggactgcggttttccaccaatccttcctccgatgccctattatataaggtacgcagattgcgcaagtaaaaagataccgtattcgggcatttcccgttctgcttcaggtaagcctcgtattccatcatcatgacggaatccatcgcatccaaaggtacatctcccgcttcgccccggaaacggatgaaactgttgagtgaactggcatagacttcggatgtccgctctttccccatgcgtttggtctggtcgatgactttccgggcatagacaaagaaacagtcgtcatgtccttccggactgtgataggcaaggactatctgctcggaagaaagtttccctgactgttccagcttccggataatgccgttcaaccgtttctggtcttcctccatacggaaacgcaaggcttccagatagcgttcccggtccggattgcctttcacgctgcggattttgcccgcttccttgtcccattcataaaggtgcaatttataccccgtactaatcaggcgggtctgccgcccgtgtatcacttgataacataacgtgccctctttgcctgcgaccgaagaggacctgaacttgatttttattgttgccataataatcgttttttttgctgataaaatataagtgagccggggacatacggttgtcctcccgtatgccccttaactgtttttatccaagcgcctcaaatcctcactttctttacctgcggtaaaggtgcctccgtttgcatttccggacggatatgccaagtgtgcctgtctgatggcggagtcgggacgatttcatgagataccccggcatggagactttctttctgggattcttttccctttccgtcttcttccagtactggctcttgtttaggagccagttccaactgtatcttgcggtcaagagcggaaagttcggatttcagttgtttcagttcctcctccttcttccacgtcttgcccgctatctcctgcaactgcggtatctcacgctccagcacctcgttcttttcctcgtactgcttgataatcgccgggatacgctccaacgcattgaggaagttcaaggcggcggcatgggtgtccgccatcgccaaatgcccgttgttgtaggtgtacttgtagttaccctcgacatggaaacggttgtcgatgaactccaacccctcgctgagcgtccgctcgctcaccaccttgatggggaagccgtacaattcaccgatacgctggggtactccgcctgtcgtggcgttcttggctatatcctgcaaccgctttccgatggccttttcatcggtggtgtccagcccgtcaatctttatcaggttgagccggtttccgtccttgtcgatctgtgcggcagcggtgaacttctcccaatcctccgtcatggcggcgataatggcttggttgttgcgcagagcggttgtcttgctttccagcttcagttcagaatcgcgcttgcccctgttgaacgacttgcgctcaccctccagcgaggcgattttcttttcgagcttcgccttgtccagcaagtccgtgttgcccgacagtatcgccatgtattctgagaagttcatgcccgacttctcgtccatcgccccctcgtcgatggttcgtgcgcccatcgcgccggacttcaactgcgatatgaacgtctgcttgcagtgcaacaagttgaacttgtacgagtccagcgacttctccacggcatagatgatgacgtccaccttgttgtccgcgtacagcttggcaatctcgttgcctttcctgaccgcccgtccgtcacgctgggcgaggtcggacggccgccacggcgtgtcgaggtgatggatggcgaccgccctgcgctgggcattcacacccgtgccgagcatactcgtcgatccgaacagcacacgcacctgcccctcgttcatcgcctcgatgaccgccttccttgccttctcggtcttgcactcctgaatgaagcggatttcatgggcgggtatgccgtagtcctccaccagcttgcgcttgatttcggtatagacgctccatccgccgcccggctggaatgtaccgaggtcgctgaacacgaactgcgtacccctctgcgcatcgtatttatgatagtattccgctatcatcttggcgcaatggctcgccttgttgtcggggtggtcttcgtaattcgggtcaatcatgcgcatgtccaatgccatcttccgggcatagtccgtggcgatgagcatcttcgccttttcctctgtttccgacagcggcggcctgcctaagatagtcgcatcgccggacttggcgaactgcatcagctttccgataaacacctcttggtcgggcgtgggcggaatgtggtgcagtatctcgttcttcttcggacgttccacgccaatgtcctccgccgtgcggtagtcggttatctcgttgtagaacgccgccagttcgggtactttaataaagtagcggaaacgttccttctgcacgatgctgttcgttacgttgaactcaaagtcggtcgtcttcttagcgaatatcgccgcccatgcgtcgaaacagcggatgtcctgcttctccaacgccttcgggcgcaggtacttgaacagcagatataactccgtgaggctattggatatggtcgtgccggagaggaacgtggctcccaaatccctgcccgtccgttcctgtatggtgcggatggcgaacagcaggttcagcgccttctggctcccctcggagttgcccagccccgccactcggtcgtggcgcgtgttgaacgtcaggttcttgaattggtggctctcatcgacaaagaggtggtcgatgcccatctgcttgaagtccgccacgtcgtccgccctcgtcttgatggcgtgttccaccttttccaatttggcttgcaggttgaacttgcgtttctccaagccccgcagcatggcgcgtgacacgtccttgccctgactacgcaatacctcaaggttttcctccaccgtgtccagttccgcctgcaagatgcgctgctgcaactccggcgactgcgggatctttccgaactggtcgtgcgacatgatgacgcaatcccaatcgttgttcttgatgtcgttgaagaagcgcacccggttggcggcggaaaagtccttctccgaggcgtagaggatgcgggcgttggggtaagccttgcggtaggtctcggcaatctccctcacgttggctttcaacccgataatcatcggcttgtgcgccaagcccagacgcttcatctcgtaggaggcgacgcacattatcagcgtcttgccgccgccaacttcctggtcgcctatgccgccgccgttctgtttcaccatccatacgcaatccttctgcgaggggtacaagtcctttatgcccaagcctttcaggtccaagcccgggaacttctggtgcgagccgtcgtacttcgggcgcacgaagcagttgaacttgccgttgtacatatctgtcaggcgtttcttgaactccggcgactgttcttccagccattcggtgaagccgtttcggatttcgtcaatcttcgcgttggcgagctggatgccctcgctgtcgcgcaccttgatgtcgttcccgttttcgtccttgccgatgcttttcatcatgtccgggcaggtgttgtgcagcgcgtgtttcagcaggttcatgccgtcgtagttgcggtaatagccctttaccagaaactcgtctgtgattttcatcgtcttgcaggcacagttcacggaatactcgtcaaggctttccgagtaggttatccgcacgtccgtgtcgaacaggcggctcatgtaggcggcatacacgcccgtgggtatccaacgctccccgaagttgaagtccaagtcctcgaaggggatttgttcgggcacattctcgcgcaaagccgccaatgactcctgcgcctgcggcagcattgcgtgtccctcgtgttccctaatccagccctccacgtcggcgactttctgcaccacgttcccggcgatgaagcggtcggcaatctcgtagccctccgccaacgggttgtagaacacccgccctttcagggcttccagcatctccgcttgcggcaggtcgcagagggattccatgtagggcaggttcacgccgccgtacaggttgagcgaggcggacagggcttcttcgggcgattccacttcgaccaatgtttcctgcgaaaaggaaacgggacggtcgaagatgtccgccttgacaaactgcccgtcctcgccgcgctccaacgagagcatgttgcgccccgaagcgtccatcaggatgaactttgcgttgtgcttggcgttcaggttgccgtagcgcatgacgaactcatcgtagtaggtgttcaggttgcggcgcagcagggcgttttcctcgtggttctccgcttcgtggacgtagagccgctcgtaggtgttacgcaggtcgatgtacaactgtgccttctgcgcctgcatcccctccatgtcgagcggctggaaagtcgccccgtacctggtgacatccctcagcaccccgatttggaagcggacgccgcctgtgtgttcccataccagagagccgtctttcaagtgcggctccatgatgcccttgaacgggcgtggcatcatcgcttcctctttccggcgttgccgttcttcgggtgtcaaggcggcttcttcctcgcgcatttccctttccacacgctcgatttgcgctttcccttccgcctcaaaaccgttctcaacgggataaaatgggcgcacggacgatggttgctccatttccgtagcctgtctttcttcttttttcgcctccgccgccctttccgcctgtttggctgcattggcatccatcttctcccgaccgaggcggcgcagttccgcccggcgttccggcgtgagcgacatcatcatttcatagaagccgttgatgggcgggttggtctcccagtccagactgcggtagatggcatcctccgggtcatcgtcctctgtggtttcggaagcgtctttcacatcgggtgaagtggcagaaacggtttcctgtcgggacgcttgcggcacatccatcctgttgcggataatttcctccatttcctgcgcttcttccggagtcaaggacgtgatgtcggaagccgcttctgtggatttggctttcacttttccgctttcttttttcgccgcttcctcctttccgctcttcgggagggagaacaatgttggctgtacggctttcttccctttggacttaccgcttttcttccgttccggtttcagcccccgttccgccaaccgccgctcttcctgcgtgtagccgaacaggtcgtacaagtccataaccggggcttcggggcgtttgctttccacctcctgagccacggcttgcaccggttccgctttcaactgtaccgacttttcttcttttttcgcctccgtctgcataggttgtacgacaatcgtctgccgagtctcctgccttttttccttgatgccattatagcgttccaagtccagccgtgccgacaagtccgccgacagcatttggtacaaatccgttgcgatgccctccacaccaccgctgtgcgtataaaccatagcgggcttaccgtaagggtcggtgtcccttttcgcgtcggtatggatgatgcgttccgggtggtcgaggaaatacccgttggaaacaatgttcgtgtggttgctctttaccacatcgcccaacctcttgtcttcctcggaaagttcctccttgccttcattcttttgcaggattatcaggtcacaccccacctccgtgttggcatcttccgtgaacaggttgttcggcaggcggatggcggacaccaagtccgctttccttgtcatcatgtagcgtgtgccgccgttgctttccgtattcaataccccctgcgaggtgatgaacgccacgatgccgccgtcacgcaccgcgtccagccctttcaggaagaaataggtatgcaccttccttgccgctatcttcttgaacaccgagccgttggcatattccgggtcgaacaccgcgatgtccccgaaagggatgttggatatggcaaggtcaaaacggttcaggaacggcttttctatcttctcgaagccctccgtgcgtatcttctgctgcgggtacaggtgtcccagcatcttgcccgtcagcaggtctttctcgaaggccatcacctccgcctgcgggttgtccgacagcaccgagccgatgaacgcgcccatgcccgctgacggctccagcacgaggttggggcgcaccttcttgtcgtgcagcacgtccgcgatggtgtcggttattgctttcggggtgtagaacgccgtcagcaccgaggctttaagcgagtccacgtagcgtttgtactccgtttcatccttgctgttctctctaatgattcggtgcagttccaccgtaggcgcgaacagttcgaggtcggacttcgcccaacgcgcggcgtccgccagttcccttgccgggttcaggatgcacttcaggcccccgaagccgcagtaacgctctaatagcgcacgttccctctcggtgggtgtgcgccgctcccggtccagcgtgaacgccgtgcgtaccgcctcgatgttgtcgcgcatcttctgtttcctattgaacgccataggactccagataaagcatgacggttcccaccagctccgtgtagagcaggtcgtgtccgggcgacagggcgaaggtgtcgtccgacgtgtcgtaaccggcgaacaggtttgtcaagtagggataaagctcgttgcagaacgcctcgcggccggattccgccacctcgtcggcgaactcgttttccacgacctcgcgcagcagggcgtagggcgagaagtgcagcccgtgcagcaggacgcgcatggcttcctcgtgggcatactcgaccgtacttcctgccgacctttctttttcaaaggtggtggcggcagcttcctccctctctgcaataaggtacgtgtcggaaactttgtcgggatggtattttctcaggtagtccagcaggtacagcccgtagtaggacagttccgctgggacggttttcttgttctgtttcattttctgatggatttagtggtgaaaaatcagattgtggaatggataggaaagaagaaaaaaggcacccggtatccctccgagtgccgccactaaatccatgtgaataacgagtatcaacgaattgaaacagattatgacatgaatcagtggcaaaagtaatgcaaatcgaggggagaacaaaataagctcgcttattttttattccgagatgcagcttactttattaaaaggtacgtattattttcttcctcctttcctgttagtgaatttttttgtgcctttggcttcgggaaacacgaattttgtattgaaatccgcatcgaatgtgaccattgcgctgaacggcttgccctgcctgctcttgaagccgttgaggacacccgtgctgccttttgccagcagttcgttcatttccgcgtcggtgagcgtcctgcccgccatctggcggaacacgggcagggcgcagtccgggttgtcgcagcgcaccaccttgccgtagaactgcatcgtacccttgccgcacttggggcaggcacagtccgatgccttgtgcccgaacagcttgtccgaggcaagcagttccgtggtgattttccgggtatagctttcaatgtcgcggatgaatgcctcgtgcggcatcctgcctttttctatctccgccagttccgcctcccagcgtcccgtcatctccacgtcggcgatgtccatgcccctgacgatggaatacagggcaagccctttctccgtcggcacgagcgacttcttcacgcgcaccatgtattcccttttgagcagggtctcgatgatggcggcacgggtggcgggcgtgccgatgccgcagtccttcaacgcctgccgcgcttcctcgtcctccaagccctcgcgcccggcggtctccatcgccgccagcagggtgctttcggtatgcaacggcttcgggcgtgtcatgcccgaactcatcgaacagccgctcattgccaatatatcaccttctttccagtcgggcaaaacggtgtctatgttgtcctcgccatagaccgaccgccagcccgccttgcgcacgatgcagccttttgtctcgaacgctatgccctcacactccgcccggacggtggtcgtgtccttgacgcactccggggagaacgcttccaccatgcgccccacaatcatgtcgtagatggtctgctcgtccttgtagagcgccaatggacggttgggtgtcaccaacagggcatggtggtcggtcactttcgaggcgtccacgctgcggcggttcagtccgtccaaggctccaatcttctccgcaaaggaagaatgggttgccagacggtcgaacagcatgggcacttcgtcaaacacgtcctccgggatgtagcggcttgatgttctcggataggtgacgagcttcgcctcgtagagcttctgcacgagggcgagcgtctgttccgccgtgaagccgtgcctcgtgttcgccttcttttgtagcgtggtcaggtcgtacaggagcggagggttctctatcttttccctcttttcgactttggtaacggttgctgccatctgttcctttaccttattatatagtatggcggcttcctccttgtccttccatttctccaccgaggcgaacttcacgacctcatccacgctcaccgacggcgtggtgaaatggagctggtataccggttcgggctggaaacgcttgttctcccaaaaacgttggcagaccatcgtcagcgtgggtgtctgcacccgtcccacggaatacgtgccgcgcccggcggccaccgacaacgcctgtgtgccgttgatgcctaccagccagtcggcttcgctgcgggctttggcggcttgatagaggttgtcgtattcgcggccgtccttcagtttctttaatcccttgcggatggcggcatctgtcagcgagcttatccacagcctttggaacggcagggtgcagccgatataggaatacaaatacctgaaaatcagttcgccttcacgggcgcagtcggtcgccacgatgatgccatcgctttcgttccacagcttggttatcaccttgatttgcttcaccgccgccgcgtccgccttgtagcccttgtccgtttttacctgtcggggtataagctcgaagtttttaggaatgacaggcaggctgtcgcgccggaagcccttgatgccgtagccgtctggcagggcaagctgcaccagatgccccagcgcccatgtcacgtggtagccgttcccggtgaaatacccttcttcccttttcatcgcgccgacaatccgtgctatctcacgggcgacgctcggtttttctgccaatatggtaatcatgtctttctctgtttttttattcgttgatacttttgtctttaatggggatgaaacggggcacggcattgtttgtgggatatgcgcacaaggcggtgcatgttccccgtttcagcccgtcaatacttatcggatggatttagtggcggcaatcaggaagatactttcatgcctttggatttcttggcctgctgcttctgctgcgcatcattcttcggcgtggtctgaccctgctgcaacggctctttcacgtgtttggtcgcttcgttggtcttcccttcgttgttcacggcgagctgtgtccggctctcgttggacggtgcgacggtctgcgcgaggtcggggttctgcgagtaggtcagcggtcggcctttctcgaagttgaacttcaggtacttcgtgcagggctggccttggtcgtccttcgcattggcgagcaccaccgtcttgcccgccacgtagtcggctatctgctggtcggtaaacacatcgtctttccatttcttgatggggcggatgctcccgtcctcgtttgtccacgagcggttacggcgttgctggttattcccatcttcttcaccttgtgactgttggggcgaattggaattgtcctgcgccttaccttggccgtttccctgacgctgggattgctgctgcctcggttgtcccggcacgaactccacatcgcgcttgtcggcgttcacctgcaacaaggcttggaacttgcgcccgttggagagcatcacttccttgggcaaaggcaatcccgcacgtaggatgtcctgctcttcccttgacaggttggtctgtccgattttgttagggatgcgcaccttgtcggcagggatgtccacgatttcattcgtcaggcggtcgatgctgatgtagtggggcttgatttcacctgtcttctcgttggcgaagttgacgggcttgccgaggttgcccgtgcgtttcaacgtcttcttgtcctcttcggtgaaggtgtagcccctgtgggggatgtcaaggcgtggttcattgcggataaaatggggtgtcagcttcagatagccgtcctccatcttctggaaagacaatcgggcctgcaattcgtaactctcatagccgaaggtcggctttaccgtcactaatcccgtcttgccgtagttcatcagggcttttaggtccttttccgagagtttctccttgtcaatgccgcacttgcgcagttcctcccagtttacttggtcgtccgctatcagattaggcttctcctgtgtttcagctacctgtggctgctgaacatccttctcttgtttcagttcttctttcttttccatttcttctgtctttttaatgggttcgttgttatttttttcttgtttgacattctctgtttctgcttgttgctggtacttggcggtgtccaccttgtgcgaggcaagtatctccgcgtttgccacggggtctttcaggaagtccttgatgacgggaagcagcgtgtccaccgcatccgccgccacccgatagaagccgaagcgcgtcggctccttgcactggcggtagaagttcttgaagaaattgtccaccatgtccccgtggcggtcgaagcgcaggaagtcctgcgagtgttccggcttcgcgggcttcgtattggggtagcccttgccgtccagcccggcgaccacgctgatctcgcccgttttctcgtcgcggacgaccagcacgtcctcttgctttttctttttctgttccatttttttcgatgttttttaatgggttatcaaaatcacagcttgcgccattcgtctatttccttctcatatatttccaagtggcggcggacgatgttttccgtcaatcctgaaacgctcattttccgctcaccgaacaaccggactatccggtccagcctgtcacgggtctccttgctgaggaataccggcttgcggtcttcaatggcaggcacgggcaggtaaatccgcctgtaatccgccaaggcttccttgcaggtggccatactcggtttctgttctctggtttcagccgtcatggccatgttttctttttccgttgccatcatttttacttttattttttaggtgaatacttcttgtggcccggtcttttgccggatttgttctttggggcttccatgccgggttgctctttcatgcggagcaccttggtaccgccttgcagcacttcctccatattttggctgatgaactccagcacgtccgattccttgtaataggtcttgtgaccaatccgttggtaacggagcctgtacttgcttcggaagcgttgcagcgaccgtttgcttgtcctcagcatctcgcacaggtcctggttgtcgtacaaccgttccccgtccaggtacttcactccggcggcatccttgttcaccagcaccgagatgatccggtcctggcggtcgaaacgttccatgatgcgtcccatccattcctcgaaggtgtcccgcccgaccgtttccgccgtcttcgggatattctccttcttgaagattcttgcggcttgcccgccactgcttcccgccgcttccacggccgggttctgtttcactttctctgtgtccatatcgttccttgttgatgattacgctgcaaaaatcggtattgtgcaagaggcgttttccatagtcgttaccgagtcggcaatgatttttttgaaaagtcccgtccggcaggtctgaaaaagcttttatgccgctgtttccatccctcaaggtacataaggtgtcttgccttaccatatattatatataaggtgtggggcagggactggaacaggaatgatggggagatagatgtacccgaagaacgccaacggctgccacgacaacgccaaatgctgccacgcgcctgacaagcggtggactctgcccgtaattccgtttactttgcggcataatcacaattaaacggtaatcttatggaaaatgtaatcgtaatcgagcaaaagacttttgaggaattgatggcgcgtttcaaccggctggccggaatggtggacaggttctgccgcaaggcggaggagaaacgcctcagtgaatggctggacagcacggaggtgtgccagatcctgcaaatcagcccgcgcaccttgcagacgctgcgcgacaacggcacgctggcttactcacagattgtgcgcaagatgttctaccgggcggaggacgtgcggcgcatcgtgccgctggtggaggaacgccgcaccctggcggccttgaaaggaaaaactatttgaggaaggttaaatgagtatcacttaaatcagactgacaatgaacgaattgatgacaagggaaagcggacagatggccgcgctgttcagaatgctggagcacgcattggaccacattgaattattggccgaaaactaccgccccgtattgggcggggaacgctacctgacagaccgggaagtggccaaattgttgaagacctgccgccggacattgcaggaataccgggatgcggggcgcatgtcttatatccagctgggagggaaaatcctgtaccgggagtcggatatcgaacggctgctgatggagggttatcgggaggcattccgtatcggaacctgagaaggacatgggaaaaatgtaggtggcggtagaagtcgtgtacgcattgaaaagtggaccaccctttccggtatttgcaaaaaacacttgcaaatgacccggccacctgtaggaatgtacgaaagcggcgcatcacgggagataatcctctcatgatgcgccgctttattgtgcgtgagttgataatacggtcaattccgcaccatttgccaatgcggactgaccggaaagatgaacaggcgggcggtattccgtccaccgtggcaagtgaattttccgatgacccgttctcgcagacgttttgccccgcaggtatgaaggcggaaggcaagggcaatgaccaacgggaggccgtacagcacgtccatcccgtacccgtccgcttggcggacacgacgttccgcttcgccgggattcaggatgccgctcttgtacacggcctttatcgccgcccggagcgtgagggcaaccacgccgaacagttccatcagttccggttcattcatccagatggctgttgcggaaacatccggcacgtgaagtgtgccgtgttcgtccaaagtgataatgtaacgttccatgattcctgacttttttgttattcatccattggcatttcgttccggctgttgcgccgttccatcagacggtccatgtccttcgatatcttgcagtcggtaatctgcgcataaatctgggtgctgttgatgtcggcatggcccatcatcttcgccgcgctttctatggaaatgccctcggagaccaaaagggtaccgaaggtgtgccttgcggcgtgatgggaaaggttcttctggatgcccagcatgacacccagcccgtgaatgtcgtaccaaaggatgtcccgcttgggcagggggaacacgggacgggtgtcgtccgtggtattgtacagttccagaatctgccgagcggccgggtgcagggggacgaaggtctccacctcggtcttttccctcggcttgcggatatagagcctgccctcagaagttttgccgatgtgtcgggggtacaggttatacacgtccgcgtacgccagaccggtcagcgaggagaagatgaacatgcggcgggccagctccaccttgggatccggcatcggcgtggccataaggcgtttcagctcgctgcggctgatgtggcgcatcttgggcgggtccttcttctcataatgcacgtcctccaaggggttgcaccggagcacgccctcatccaccgcaatatagataaggcggttcagccagcacaggcagtggttcacatgcccggaggcataacccagttcctttttcaggaacagtttgaacgaatggccgaactcctccgtgatgtcggaaaaggcgatgtcctccaggccacgggactggaggaactgttgcaggttgagctgcgtggtcttcgactgccggaacgtggaagtcgaatggatttgttcggcacgcagcctgagccgttcccgctccgcttcgccgcctttgagaagggtctggggaatggtcgccacacctgtcacggcgtttttcagcagttcggcgctgactgcgccctgttctttcaggaggcggtcataagcccgttcgagattcaggcggaattctgcgaggcggttgttctcgcggggctggcggatggttcccgtctggctgttccaatcctccggacggcagaagatgccggtcgtgatgaggatgcttttgccgtcgatggacacacggcaaaggacggcggtcgtgccgtcggacttgattcttttcctattgatatagggcaatatcttgaaagtgctacgcatgatggttcattttagctgatgttctacatttatttttttccaatctcgtttttacaaccctttctcataaaaccagttcaaggtctttggtcgcctcaatgaagcggtccatgtcctcgaacagctttttcggggtgactcgggcatagatctgggtcgtctttatattgttatgtcccagcatcttgctgatggtctcgatgggcacgccctcttcgagcgtgacaagcgaggcaaacgagtgccttcccatatgatagacgagttcggtcgtcagtccggccagcacgcgcaggattttcatgttcgcccgaagcgtactgtacagctggttagggaacagggtctcccgcaaatcgtcccggtatttctctatcagggcaatggcctcgggtagcagtttgacgcgcgccgtcagttcgttctttttccgtcggtatttcaaccacaggctgccttcatcgtcggtgaagaggttctcgcgggtaatggatatggtgtccgcataggcggttccggcataacaggcaaacaggaacaggtccctcgtaaggacgagggagcggcgcttttccgggatttccaagtcacgcagcttctcgaagtcctcgcggctcaacgccttcggggtggtctccttctgcttgggtatcttgaaatgcaggaaatggtaccgctcggagaacccttccttgtacgctatccggcagatccgtttcagcagggccagatgatgccgtgaggtctggttggaatacccgcattttacttcgatataggactggtattcccgaatgaactgttcgttcaacgcaccgaaggcgatgtccttcaccttgtattttttcctgacaaactcgccgagcgttttccgcgcataatggtaggtgctcatggaggacgcgcacacatcgatgccgatgcgctccctcgtttcctcgatgtgccggtcgaacagccggagcagggtcatctgggtttccatgcttccctggaaaaggttcctcacgtccgcagcgccgaaatcgcgtttccgttcctgcaattcattgaatgccgcatggatggccagcagcagtttctcgattttcgcattggtctccaccgcctcgcggctctttccttccagacggttttcacgcacgttccacagcttgggcgtgcacgagagcttggtgctgaactgcgccaccgtccggttcaatgtgatgcgtcccatgatgggagctttgcccgacttgtcgggttcggtcttcttcaaaaacagcaagaccttgaatttctcaattttcatacgcctacatttttttgagtgcaaagttattatgaatgtaagcgttcatcgctacgcaaaatactgagtatcatagaaaaacaacccgtcggagaacttttttcaatcatccggttaacacggcaggtttccgaaacaacctgttaacggttaagaaacggaaccgattcggcattccgtctgaatccgtttcagaaaggtgtgccagataatgaaatgtagctcatttctaacagattatgtttctaacgcgctgttctatttgatgttgctatgctaatgagttcccatgtggcgagacataccttcgctgtgcttatgcttgacttgggcgcagacatctacacagtatcaaaactattaggacacaaagagttggcgaccacacaaatttatgcaaaggtgcttgacaaaaacaagcagaatgccgtatcattgattccggacattgattaaatcccgtgcttatgacaaggcaagaaaccgttataaagataacgaagattacccgaatcgtcggcgaaatgaaaagccagttggatttggatgacgaaatcgaatttgaagcacttgactcttcgtggatgaatatcggaaaatgggcgaaagagatttgtctatatatggaacaagccccctctcctcttttggcaaaccttataacaaataacgaatttaccgttcctgtcgtaaactatgtacaaagtcataggctggaaattgattctgcatacgtcaaggtaattgactgttatgcgaacaatatgcaagcgttgctgtcactttgcaaaaggcaagaagaggaggtgaaaggcgaatataaagatttgattgagcctttagccaatgaacaggtggctacattattacaaagagccatacgcgcaggtctcttggatgaacactatcagccgatgccgcaaacgaagccgctgcaactgaaagtgatagcctatgctgtatctaccatctgcaaacttcccagcacctacatcctttttgaaaagcaatggaaaagggaatatggaaagcgattcagcacttggcgtgttccaagatacaatacgggactttacgaaacgaccaaagccctctacccggaagttgactttactgaatttgagccaacacatcagacagagacattctacacgccacagagtgaagaagatatagcagtgttgtatcgagatttagtgaaatacggatacatcgcacctgacactggcttgaaaacatttgtcggcattttcaataaaaagacattcagcaagccggtagaatggattaaaacgcaacggcagttgtcctttttcgtctatcaggcattttacaaattcaacaagaaggacttgtggataaaaggagaatgttgtttcagcataaacggacacactccgcacaaagcttgttttgtatcaggttacagttggattaagcgagccggatggttggataggtatgatgttagattaaaggctatctgtgataagttcaaacacattgaaaatacgttcaatgaagaaacttctgatgaacggcttattcatacgagcaaagttgtattttacagtccgaatagcgaagatgagatacattccatgttctctgccctacttgacggtggatatatctcctccgacaccacatttgccgcattcaaaggtattttcgatgaaacggtatttgaacatcctatagtatggatgaaaacacagacttcacttatgtactttgtacatttggcctttaagcaacacaatccctatgatgtatgggtaaagtgcgtaaactgtttccgcttgcaacgtgataaagtacctaacagagaaagtatggatagtaattttcgttttatagtcaaaaaaggattgattgacacatacgatattcaactaaaaaccattgcagataactatcttagcactcaaaacaaaaacgccatcaacgcaaaggtggcaaacaacaatacttaaaataatgttttatgtcaaagaaattatctttgcacctctctctttttgaaaagagcgatgcgaggtttccaatggactcctgcgcagaccggtaaagaagggctattccggttggttgagcaagcccataagtcttacaaagacgaagtcaccacacagcaaaaaagttacaggcgatacgtgcttgactttacccattcacatcggtttcacgatgcgaatgatgcctggagcaagaatgaacatctaaagaattaccacacggtaatagagcttctggggaagcatgaaattttgattcgcaaacatttcgaccatgacctattggacgaaaatgggatcataaaacttctgaacgaattttacgccattgatctgtcggaatccactaccgagtccgacaacagcagtccggggaatcctattcagaccaatcagaataccaacatcaaacctttacttgacagacatactctggacctcattgtgcagcttgccaatgaggtctgtttgtttaaggaagttttggatgcagacaatgttgccatttgttatgcggcagacacattgcagactgtgacttcaagaaacaacagcaaattggttttattgttggacaaactggcttcacacgatgtgataacctataactggcaatcggtaattgcccaaaaacatcttgtcatcagttcttcaaggaagaaattactgacccaacacgatatgtcatcaaccctcaatcggataaaagacaccactcccaacgccatagataagcagtttttggcaatcatagacaagtatatcactctaatcaaaaacagagaagtataacaaaggaataacaaattgttgagagttgtattgagaattgtgttgatactcaacaatctcaacataatcaagcgaatatactcatctacctttgccctccgtaatcgattactcacggagggcatacctcccattgtcaaatttaacagcatcaatcaatgagacatcgaagaacgacaaatgaaaataagatgctctccaaaatggagaacatgatttcgatgatggcaacggagaaaccttttgaacggctccaatcgttagaacaaaagatcaacgaagtggataaaatccagaccatcgagaattacattgcacagttgaaagagcgtatttgggcagtcaaggaagtgctgactaccgctgaagcttctgcttatctcggtttgtccgagagttatatctacaaactcacttctctcaagcaaataccacactacaagccaaacggcaaattggtgtatttcaacagaaaggaactttgcgaatgggcaatgagaaatcaagtacaaacaatagggcaacctgctgctataacaagagaagaattatgaatagaaaagaaatagacttactactctcccgtatcgaaggattgaaatcattcctcgaaaacaactccttggaaaattttcagcaggaaatcctgaatgttgaaaattacctgaaacgattcggttctttggccgaactgctatcccatcttgaaaatgtggaaaagatagcttatgccgcaaaagagtttctcaatatagacgaggtagccgcctatctacaagtgtccaaaggctatgtctataagttaaccatgcagaaagaacttaccgtgtataagccgaatggaaaaaacatattcattctcagggatgacctgaaccgatggataaagcgcaacccctgtttctccaatacagaaatagaaaggcaagccaatatcatcgcttacacattgggacaaaaaagtaagaacaaaccaacaaaaggagggaaaaaataatgcaacctgatatgatacaacccaacaattatcggatagacgaagccaaatataagtctttattgaaatatatacggctgagtgttaccgaaaaatatgagtttccacaggaaatcgtacaaatagacggtgttaccattgccacaatcggaaatttcagtgcttccaccggcaaacccaaaagcaaaaagacattcaatgtcagtgctattgtcgcatcggctctttccggaaaggagattctaaagtacaaagcagaactgccatcttgcaagaatcgaatcctatacatcgacacagaacaaagcaagtgccattgccacaaagtgcttcatcgaatcctcaaactggcaggattgcctactgaccaggaaaatgacaacatccaattcttggttctgcgagaatacactcccgaccaaaggagagatattatacgatgggcactccacgaagagcaaaacatcgggctcgtaatcattgacggcatccgtgatttaatccatgacataaacagtcccagtgaatctcttgacataatcaatgaactgatgagatggtcaagctattacgaactgcatatccacaccgtcttacatctaaacaaaggggatgacaataccagagggcatatcggaacagaactgaacaataaggccgagactatcctgcaaatatcaaaaaacaatgaaaatggaaaaatcagcgaagtaagagccatgcacataagggacagggaatttacgcctttcgcatttgaaatcggagaagactctctcccacacctggtaaaagaacatcaattcaaaaagaacaaaatggacagactggcttcttatatagatatgaccgagcagcaacaccgaaccgccttggaagtaacctttgaagaatgcgcggaatatggctatcaatctttgcttgaagctcttaaaaagggatatgagagcattgggtattcaagaggaagaaacacattggtaaacttgtgtaagttcctgttggaaaatcatgccattacaaaaaacggtcgtacctactcctataacccttcattccacctctaaccggtatggtttagtttgtgggtatatataagtaaaccatactaaaatgaatatcaacgaagcaaaacagatacggcttgtggaatatctgcggataataggacattctccggtcaatgcgcgtggctgccagtattggtacctctccccattgcgagaggaacgtaccccctcgttcaaggtcaacgataatttgaacgaatggtacgactttgggctttctgccggaggtgacatcatagaactgggaaaacacctttatcgtactggcaatgtaagtgtggtattgctccgtatcagcgagaatgccattggcgtaccttttcaacagttacaaagccggagtgtccgcccctgtcctatcgaggaagaaatggaaaacgtggaagtaagagaactgagccaccatgccctgttgtcttacctccgttccaggtatatcagcgagaatatcggcaggctatattgcaaggaaattcattatgagctacgcaaaagacactatttcgccatagcctttgaaaacaagaccggcggttacgaggtgcgcaatccttattataaaggatgtataaaggggaaagacatatccgtcatcaggtataacaaggatataatccaaaaccatgtctgcgtgttcgagggctttatggacttcttgtcttaccaagaacttcatagaaaaggagactatcatgtctgcatcgacagtcctaccgattttcttgtgatgaactcagtcagtaatctgaaaaagtgtcttgtggaactggaacggtacaccgccatccattgctatctggataacgaccttgccgggcgaaaaacagtcgaaactattgccggactttgtggcaaccgtgtaactgaccattcggaatgttattataattacaaagacctcaatgactatctgagaggcaaaaggcgttagtctttgtattccctttgatagaaatatagtatccacgaaaggctctccgcacaggagggattttcgtggatatgtgtgtaagtaaacctggttatggatttttcctattatctatttggctataatctcccaatagccggtcttagtagaacctaccctcttaataacattcaattcctgaagctgcttcattgtttgggcgacccaccttcttgaataacctgtcagattagcaaggtctgtcatggttactttgggattgatttgtatttgttccaaaatttgtagtgcagtttttggtgcagtttgtagtgcagtttgtagtgcagtttgtagtgcagttttgagtgcacctcgccttgatgccttcacggaagcatctttgttggctatgtcggctattatatttccggcagcttcgtggcaaggaatcgtgatgcggaagaatgtgcggtcttcatccgtgacaacggttgcacgtggagagccattattctccaacacattttgtatggtcggaatacctgtagaacgcccttcggtcatgtccagttctttaagatattcacccaagcgacggttgcggtaacgttttgatacaagaatctcacaacgggaaatgtcagcggcagatatacttcgatccgggccacccacattttgaatggtaatactatccggctctactgttattacgacaggttcccattcccgatagtcacgatgataaagcgagttcgtgacactttcttctaatgcctgataaggataagtatagaatttcctactgcgatagtcattctccggtttgatgatactctgcatcacgagcatacgcttcaagtattccaaggtgcggtctataatctgcggaacagaacctgtgatgactgctccttcgtaaaggttactcggattattcagccttccttcagggaaatagacaatctccacctgtgtccgcttgaaaaatttgcttggattctcacagaacatcatggcagccacatttctcagcatacgtttttccttcggaccgacaaacaagtccatctgctccagaatctcttgcagtggtctgatgttaatctcgcttgccagtttgcttccgactttcaccaggtattcacgcaaaagcaaagtggatatgtcttccaaacgaatgtcagggttgcccctttcatcaaatggcacacgactggcaagttcgcgaagctcatccagcacctcacctttggcgataatgctgcttgttccactgcggatatagaagtattccttggaaccgttctttgccgttacattctccggaacagaatacggacggttaatcccggcagggcaccatattacgagtacagtcttgccgtccacttcctccgtgcttgtccgaggcatatagtacggggctatcttgttattatagccgaccatatcctgaaggatgtcatcaatctcttcaatgggtattccttcaacaggccgaatggcaactccggtcttgtcgtcagtgtcaacgcctaccacgatataaccgccaccaaggtcgtcaaaatcatttgcgaaagcgcatacgctgtggtatatgctcaccggattccaacctttcttaaattcaatccgattggattctatcctctgtttgttcagcaggtcgtctatgttgatagcaagtgccataattattcatccgcttaatggtaattgttctctgttcgtctttcaaaatatacatggcagttttgcgttttcgtcttttattaccacaaacaccttgaaaatctgttgcaaagttaatgattttgcacgagttgagcaaagaaacgggtgattggtttaatagtcattgatgaataagagactttcatctgatcttctttggaaaatacaagtaaagacattaagccgggcaaaccggacaacctgttcatctttcatcctcgtctcaatccggctcgtttttcggttcaaaattgcgcttaaagtatgataattgagtatgattttagattttctcagaataatgtttaatattcagccgcttttcgcaaggatatttcgtagtatgaaattattgtatttcctttgcgttcatattttaatcatattctaaaatcagactataagatatgaaagcatatttcatcttcgccattgcgctgaccgtggcatacatcatctactacgctgtgatgatagcaagagacctttatggtaaaaacgaagaaaagataaaatccggagaagaagaatttgacgtgagcgattttgacgaggaagaaagcgtcagcgtggtggagaacgacaagggattcaatatcggagataacgagtatgagacacactacatcgatgagacacagaatgtgtcggaggaaacaaatcccacagacgaaaagccgagacaggatgtcatcgaggctctgaacaacaaggtcaaggctaacatggaagagacacaggttaccttctccaatccttataactccgcagagctgtacaagctgatgattcaaaatggcattggagaattgcatccggacggaggtgtaaccaccaagaacgtaattgatgaactatgacccgacacaatggcaaaagaatactaagcgcactgtgtacgctgctcccttgttccgtcttcgctaaaagcggcggcgtgaactactcgtggggagcggacgcactggcttccatgcacgactatgtggtgacgatgatgctctatgtccagtatatcatttacgcggttgcaggaggttttgcggtcatagccgcattccagatatacatcaagatgaacacgggcgaggacggaataaccaagcacatactcacgctggtcggggcctgccttttcatcataggtgcaacaatagtcttcccggcatttttcggctatcgaatttagaaaatcacgagtgtaaaacaatcaataaagttcaattaaaacaagacaagtatgtttgaaaaagtaaaacgattcgcaaagaaaatcgcgacttcaaagaaaacgcagatgacctgcctgatggtaatgtgcggtgtgaccgctttgatggcacagactaccgcaggagactactcggccggaacagcggcactgacccaagtgagcgaggaaatcgccaagtatgttcctatcgtggtgaaactctgttacgccattgccggtgtggtagccgtagtgggtgcgatctcggtatatatcgcgatgaacaacgaggagcaggatgtcaagaagaaaatcatgatggtggtcggagcctgcatcttccttatcgcggcagcccaggcacttcctctgttcttcggactctcctaaaccgcaggtatcatgaacgggaaagaggaacactatccggattatccattgttcaaggggctgcaacgtccccttgaatttatgggtattcagggtcgctacatctattgggcggcagccacgataggcatcgccattgtcggcttcatcatagcctactgtatggcaggattcgtccttgccctgattgtcctgtccgtcaccgtgacaagcggtgtgggactgattctgttcaagcagcgcaagggattgcacagcaaacggctggaacgtggggtgttcatctatgcctactcaaagaaaatgtaacagaaaaccatttgaccatgaatggatatattgaatgttgaacgtgggtgggcttgacctttcaataggtcagcctgcccttaattgtaaacagccgaatgattatatatgttttcatagtcttcattgccctttgcgtgggcatggccgtgtcggtctatgcctttggaactggcggcaagcggaaacgcatctttcaggacatctatttctccgtggaagaagcggacgggattggtgtgatatataccaagaccggagagtattccgccgtgctgaaactggagaacccggtacagaagtattgcgccaatatcgactcttactatgagttcacgcaacttttcaccgccattgcccagactttgggagaaggctatgccatacacaagcaggatatttttatccggaagaatttcacggaagagagtgacgagaaccgtgaatttctctccacatcctatttccgttacttcaacggaagaccttataccgacagcgaatgttacctgactatcactcaggaagtcaagaaaagccgtctgttttcttttgacggcaagaagtggcgagacttccttgtaaagatacgcaaggttcacgaccaactgcgtgatgccggcgtacaggtgagattcctgaacaggcaggaagtcaatgaatatgttgaccgctatttcgccatgaacttccgtgacaaggtagtctcgatgactaacttcaaggtgaatgatgaatgtatctccatgggagacaaacggtgcaaggtgtatagccttgtggatgtggataacgtgagcctgccgtctgtcatccatccctacaccaacgtggaagtcaacaacagcagtatgccgatggatctggtgtcggttgtgtccggcattcccaataccgaagcggtggtgtataaccagatgatattcattcccaaccaaaagagagaactggccttgcttgacaaaaagaagaaccgccatgcgagtatgcccaatcccggtaatcaaatggcggtagaagacatcaagcgtgtgcaggaggtggtggcaagggaaagcaagcaactggtctatacgcactacaatcttgtagtagccatgtccgcggacaccgacctccacaaatgcaccaaccatctggaaaaccagttttcaaggatgggcatccatatttccaaaagagcctacaaccagttggagctgttcgtcaactcctttccgggcaactgttacggtatgaatcccgactatgaccgtttccttaccttgggtgatgcggcagcctgtctgatgtacaaggaacgcatcctgcatagcgagaaaactcctttgaagatatattacacggacaggcaaggcgtgcctgtggctatcgacatcacaggaaaagagggcgcggagaaattgaccgacaacagtaattttttctgtctgggtccaagtggcagcggcaaatccttccacatgaacagcgttgtgcgccagcttcacgagcaagggacggacgtggtaatggtagataccggtaactcatacgagggattgtgcgagtatttgggtggaaaatatatatcttacacggaggaatgcccgattacgatgaaccctttccgcatcaacaggcaggaattgaacgtggaaaagacaggcttcctgaaaaatctcgtgctgctgatttggaaaggcagccaagggacggtcaccaaaacggaagacaggctgatcgagcaggtcatcaccgaatattacgatacctacttcaacggtttcgatggtttcaccccaccccaacgggaggatttgcgcaaaagccttttgattgacgaacgaaacaaaagcggcaatcgcgctgaaagtgaaacggaactgaacgcacggatagaaactgtcatagacgagatagaacgcaggagaaaggaactgaaagtggaatcactgtcattcaacacattctatgagttctccgtacaacgcattcccgacatctgcaatgaaaacagtataaccgggatagacatttccacctaccggtatatgatgaaagatttctatcgaggtggcaaccacgacaagacgctgaacgaaaacatggacagttcgctgtttgatgagaccttcattgtctttgaaatcgattccataaaagatgacccgctcctgttccccttggtgacactcatcatcatggacgtgttcctgcaaaagatgcgtatcaagaagaaccgcaaagtcctggtcattgaggaggcatggaaagccatagccagccctcttatggcagaatacatcaaattcatgtataagaccgcccgaaagttctgggcttcagtgggcgtggtcacacaagagattcaggacatcatcgggtctgagattgtaaaggaggctatcatcaacaactccgatgtggtaatgctgcttgaccaaagcaagttccgtgaacgctttgataccatcaaggctattctcggtctgacagacgtggactgcaagaaaatctttaccatcaaccggctggagaataaagaggggcgttcgttctttcgtgaggtctttatccgccgtggcactaccagcggtgtgtatggtgtggaggaaccgcatgagtgttacatgacctataccacggaacgggccgagaaagaagccttgaaactctacaaggctgaactgcaatgcagccacaaggaagccatcgagcgttattgcgctgactgggatgcttccggaataagcaagtccctgccgtttgcccaaaaagtgaatgctgccgggaaggtattgaatcttcatcaaccaaagacaaaacaacaatgaaacgattcgctctcataataatgacaatagccacgattttcgcccaacaagttcatgcccagtattacagcgtgaacttcgatgcgaaaaccgttgccgctatggttgccgcctacggtactggaaccgttgcagaagcgtattatgacgagcaggtgcagaatatactgaaacactacaaggcttcggaagtggccactgccggaatatttgccagcaagttcctggagaggaaggcactcactgatttgggcatctggagcagtgccaccgaaaattactactaccgcaggatttatcacttggtggcgcacaagattatcccgaagacatggattgtcgccaagctgatgctccgttctccacaaaccgcactccattggtgcagttatctgatgaaagtgtgcgatgacaccaaatccctctgtatgcagttcgagagcgttgtcaccaacagcacactgtctttctccgatatcgcctttctggaaatcaatgaggaaatcgcctccatcttaaaactttccgagattggcaacgtggactggcaacggctctttgatgacatatccaaaataccgggcaacttcaccaaggaaaacctgaaagccgatttggacaaactttaccggatgggagccggtcttgccacttcgggaatcaccaatatcgggaacgccttgttgcaacagaactcgtttcacgagctgatgaacgggaaggtcagcaaggtcattgacatctacgagcattacaacggacttttcgagcaactggagaacaatgccggacagaccatactgggtatcgtgggtagtgaagaaaatgtggcaggattgttcaagttcagcgactacaacctcacttcgtggattaccgattatttggacgaaacagccgggaattactacacccagcgatggtacatcgcgaggcgtgaccgtggcagtgtctccctctgcgactattatcccccgacagatgacaagagcatccttgaaggtggtgaatggacccgcttcaagacaagctatccgaacttctatcccaacgcatcgcaaaaggaacaggccctttccaattcggaacgctacgccggatggtcaaggaacagagtgcaacagcttaacaacgccaatgacggcttcagttacaccatcaattattaccagtccagctatatcattaaaaaaggaaagaagcagaccaagaaggcatacgcctacgaaatccatgtcacgaaaagctggaacaacgaggaaatagtctatgaagacgtgttcgattcctattcgatggatttgaacacattcaaggcacaacttaatgcacatctgtctgagtttaacgacaacgaagacggctatgtctattatatcgcttccgacagccggaactattaccaggcaaccaatgaagagaaactgaaaggatgcgaaacggtaacaatcagtgtcacctgttcggacggtgcgacacttgggcagggaacaacccagtacaagtgccggaaatgcggaagtacgctcaacgcacattccaaagagtgcgcgatgaagactacagctgaaagcgaggaactggatttgtctgaactcgatgccatgcagcgggaagcggacaacaaggtttacgcgctccagtcacaaatatccgcattggaaacggaaaacgaatcgcttatcaaacagattgccaatgccagtgtggaggatgccgttcctctccgtcagaaatacaatgagaacaaagcggagatagacaggttgaaacctgaacttgccgcctggcagcagaagcaagaggaaatcgcacaggcaaaagaagaagccaaaagcgacaacgatgtgcagaccgatgactattaccggataccggctatcatgcaagactgcaagacggcttacaatatcacctggcaggacaacggttcctggaacggctacacctatgtccgaaaaggcacaatcccgaatatcaacggcatcatcacattcaaggcgacactgaaaatcgcccgaaagcccaaatacttccttggcatcaagatacacagggctatcctgcaaatctcctgggacttggcaacggagtattcggatacccatgtggtggaagtgattacgcttgaccccgatatgagcgacaaggaaaagacaaaactggtcaatgaccgcatagcggaaatcgcgaaagaatatccgaagtgcaagataacgactgaatacgcccgtactgcaccgcaggaggacacgaaaacaaacgatatgtatcacctgctttggtcaagcgaccggctggagatagcccgtgaagtggattcccggctcacgaagatttacgccgacttggtatcattggaaaagatgatgcactacaggcgcagtatcattgacgtgctgaaagatgttctgccacccgttgacgatgatcaggggcgcagactttcccttgtggaggaatgtcacgaccgttggatggaaaacgcacgaaacagaaagactaaggagggcaagcgatgaaaagaggcaggacatatatactcggactgttgataatgctgctggcacccctgtccgcaaatgcgcaatggagttttgatgtggggacggttgaagcctatatcaatgaccacaagcaacagcgaagcctcttgctggctcgctccaccttggaacacagcaataaactgttgcatgagtacagccgcaaggaaatggtgggttataaggaactgaacgtggatctggacaagtacaccagagctttcgatgtaattgacgtgatgtaccagtccctgcgcacggcattgaatgtacattccacctacaaaggggtcagcgaaagaatatccgactacaaggcgatgcttgaagatttcagtgagaaggtcatcaagcgaaagcacatagagttggcggacacgctgatattatccatcaatgccggagccatacggatgatagcccaggaaggagaatacctatataaatccgtgagcgatttggttctgtacgccacaggtgcggcggcctgttccacttcggacttgctgatggtgctgaacagcatcaactgttctcttgacaatatcgagaagcatttgaaccgtgcctatttcgagacctggcggtacatacaggttcgtatcggctattggaaagagaaagtctatcgtaccaaaaccaaacgggaacttattgacgatgctttcggacggtggagacaatcaggtaaacaggattattgataactaaaaatagagaaattatgaaatggatttttacaacgatgctgttcgtggcaaccattgcggcaaacgcccaatatgtcacctacaaccacgattcgcccaagatgaaccaaatcacggtggaagaaaccggagccggtgcgctcaaaccggaactttattacacgttgctgcacaacaaatacaagaaaacggcagcggtcaagaacaaactcacattccgcacggcggcaggcgtggcttcctatcagcaggtagatgaagcggaagccatagattccgcactcacaagcagagccaagattgaagccttgaatgtggcagaccgacaagtggatctggcctggcttgcggaaaaggacaagatagaatcccagatgcggcagtttcagaagaacattgaccgcataatgatgacaggcggctcgccaaaagaaaaagaacggtggaacgactattaccgtgtctatcaatgcgcaatcaaggcaacaagggatgcctatatgcccaatgcgcagcgtaagaaagagtatctgcaaatctatgccgatgtctcccggcaaaacgatgtactggtgaaatatctcgtccagttgagcaaccgcaatgccacgaagaatctcctttcggcaacggagaaccgccagatagacaaaagaagcattatcagcaatgccatgagtcgctggaacgaatcccggtcagcagtgcgagggtcgcagaatgatgacggaagcgaagacggagacggtaatgagagtgtgaacagataaaattaaatggaaaaatagatggcaagcggagatatactttcagatttcggcatcaatctgcttgaagaagagattgatgatgtgatttttcagaccaacgagttcctgacggatgccaccttcacaggttcacaaggcccgttttggtggattctccagatgtgtatggcactcgcggccttgtttgcaatcgtcatggcagcaggtatggcgtacaagatgatggtcaagaatgaaccgctggatatcatgaagttgttcaagccattggcaatttcaattatcctatgctggtggtatcctccggctgacacgggtatggtaaacagcggaagcaactggtgtgtgttggatttcctatcctatatcccaaactgtatcggctcttacactcatgacctgtaccaggcagaagccacacagatagaggataaatttcaggaggtgcagcaactcatctatgcaagagatacgatgtacaccagcctgcaagcacaggcggatgtggcacacagcggaacttccgaccctaatctgatagaagccactatggaacagaccggggtggacgaagtgaccaatatggaaaaggatgcagccaaactttggttcacttcacttacttccgggattgttgtaggaatagataaaatcgtgatgctcatagctttaattgtatttcgcataggctggtgggctacgatttactgccagcaaatcctgctcggaatgctcacgattttcggaccgatacaatgggctttcagcctcttgcccaaatgggaaggagcttgggccaaatggctgacaaggtatctgacggtacatttttatggtgcgatgctctacttcgtcggattttatgtcctgcttctgttcgacattgtgctttgcatacaggtggaaaacctgacggcaatcacggtaagtgagcagacaatggctgcttatctgcaaaactcctttttctcggcaggctaccttatggctgcaagtatcgtggcattgaaatgcctgaaccttgttccggacttggcggcatggatgattccagaaggcgacacggcattctcaacccgaaacttcggtgaaggtgtggctcaacaggcgaaaatgacagcgaccggtgcaatcggcaccatgatgcgataatcgtaaactcataatcaagaatatacaatggtaatcagaaatttagaaaacaaaatcaagttagtgggaatcatctgctcgttcttccttgtcggctgcatcatcatcagcgtaagcagcatttggacggcacggacaatggtgacagatgcacagaagaaagtctatgtgctggacggcaacgtgccaatattggtcaaccgtaccacgatggacgaaacccttgatgtggaagccaaaagtcatgtggaaatgttccaccacttctttttcacgcttcctcccgatgacaagtacatcaaatacacgatggaaaaggcgatgtacctggtggacgagaccggacttgcacagtacaacacgctcaaagagaaaggcttttactccaacatcttgggaacgagtgccgtattctccatttactgcgacagtgtgcggtttgacaaaagcaatatggagttcacttattacggacggcagcgtatcgagcgcagaagcaatatcctgatgcgtgaactggtgacggcagggcaacttaaacgagtaccgagaaccgagaacaatccgcacggactgcttatcgtaaattggcgtaccctcctcaataaagacatcgaacagaaaacgaaagcaacctattaaaatttacagatatgaacaccaaaggattccgcaggatgctgttcggcgaaaagatgccggacaagaacgatccacaatacaaagagagatacgagcgtgatgtgaatgccggtcgcaaattcgcccaggcgacacgtcttgacaaactggccgccaagatacagggctttgccaacaggaacaagatactgttccttgtcatggtattcggtttcgtaatcggcacattcaccttcaacatttatcggctgaccaaagcttatcggcatggtcaggagataagaagtgctacagaaatgcaggacagcctgctcagagaacgccacaaggagccggttgctcccattgttgaacccacccaaaccagacaacaatgaaaaggatattcgagaaaatcaatttcaggcagcccaaatatatgcttcctgccatattgtatattccgctgttgggcgcgtcctatttcatctttgacctcttcaatgcagaaaaggcagagatagccgacaagacactccagaccacggagttcctgaatcccgacctgcccgatgccaccatcaagggcggcgacggcataggaagcaaatacgagaacatggcaaagtcgtggggcaagattgccgactacacggctgtggataacatagaacgagacgaacccgatgatgacaaggaaaaatacgaatcacagtacagccaggacgaagttgccttcttgggtgaactggaacagcagaaattacaggcagaggacgctgccgatgccaaagcgagagagcaggaagccctcaaagaactggagcgtgccctcgcggaagcacgactaaaggcgcaggcacaggtggaacctgttgaaccgcttgcagaagacagtctcgaacaacgcacggaaaccggagtgtccgcaagcggaacaatcaatgaagacagccgggcggtaaacgctccttccgaaaacgaagaaccgggtgaaatgatcaagaaagtaaaagtgacctccgactatttcaacaccattgcccaaaacgagcatgagcctaatctgatcaaggcgattatagacgaggatgtcaaggccgtgaacggaagccgtgtcaggcttcggcttttggatgatgtggaaatcaatgagacggtggtcaaaagcggttcttatctctatgccatcatgagcggtttttcctcgcagcgggtcaagggaaccattaacagcgtactggtgaatgatgaaatcatcaaggtcagcctttcgctctatgataccgacggactggagggactgtatgtgccgtcaagttcattcagggaaaccgccaaagatgtggcaagcggagcgttcaacagcaacatgaacatgaataccggcagtaatggcaacagccttacccaatggggaatgcaggctattcaggatgcctaccagaagacgagcaacgccatcagcaagaacatcaaaaagaacaaggtcaacctgaaatacggtacgtttgtctatatcatcaacagcaaggaaaaaagaaatgcaaagtaaataaccattcaaagaatcatagatatgaagattatcaagactatctgtatcggagtaacggcggcattgtcgagcctgcctacattcgcccagcagacttacgaggaactggagcaactgaccgtcaacgagcaagtgaccacggtcattaccgcttccgaacctatacgcttcgtggatatttccacggacaaagtagtcggtgaccaaccgataaacaacacgatccgtctgaaaccaaaggagacgggatacgaggacggtgagatactggccatcgtcaccattgtcacggaacgctatcgtacccagtatgcgttgctctataccacaaggatgcaggaagccgtgacggacaaggaaatcgagttccgggaacgtaacgcctataacaatcctgccgtgagtatgtcacaggcggatatgacacagtttgcgaggcgtatatggaactctcctgccaaataccgcaacgtgagaagccgggaacaccgcatgacgatgagattgaacaacatctacgcggtcggtgattattttttcattgacttctccattgagaacaagacaaacatccgttttgacattgacgagatccgggtaaaactcgcggacaagaagttgtccaaggcgaccaacgcccaaatcatagagctggctcccgcattggtacttgaacaggcaaagtcattccgtcatggctaccgcaatgtcatcgtgttgaagaagatgaccttccccaacgacaaggtactgaccattgaaatgaccgagaaacagataagcggcaggaacatacatctgaatatagactacgaggatgtgctttcagccgattcgtttaaccgtgtattattggaggaggaatgatgaaaaagatattattggtattggtcacggtaatgacatttgccatgaacggtaaagcgcaaagcaacagcgaccgtctttcgttgggtgtcggttgcctgtatcaaaacgggctggacatcaccctctcatacgaacatgagggcaagtaccaccacacatgggagttttttgccaatggttatctcaaatgggacgaatgcgcatcctgcggtcatatctgtccggaatcattctggaggaattacaggagttacggattcggagtagcctacaagccttgtgtggcgcgtggtcgcaaccattacggcaatgtccatatcggggcatcggccgggagtgacacaaaacggttcttgggcggcatccacctcggctatgaacacaattacgtacttcgaggtggctggagacttttctgccaggtgaaaaccgatttgatgataaaaggagaagacctgttccgcacgggcattgtcttaggtgtaaaattacctctaaactaagggaaaatgaaaaagaaattatacataaacgcttgcaggctattcagtctgtcggccatcgtcatgttattcgtggcctgtgacgcacaccgggatttcccggacacggcaatgaagccctgtcatatcctgtgtacggacggcaaagtgttgtcggtatcagacttcaagcaatccgaaaaacagcccattgccgtggtgttccatgtcaatcacgatgaagccattgaaggcaacggctatgcggtttacctgtgggacttggctccggaggcttttgcagatagcataggggtaaaccaacgcacatctactgacatcacggcactggacggcaacgaaaacacctttgcaatctacgacaccagagaaaccacctcgcctatggcagaagcagtcttcgccctgtggcggtacggacagtcgtcctatatcccatccgtggcacagatgcggatgctctataatgccaagagccagataaaccccatcatcaggatgtgcggtggcgacgaactgcccgatgcagccgatgactgctggtactggacgagtacggaagtggccgggcaggaaaaggcgaaagcgtggctctattccatgggaagcggctcgatgcaggaaacacccaagacacaggcgcacaaggtacgagcaatcattaccttgagagattaagaatcagaatatacaagaattagcgaataactggaaacgaaatggaagaaagcaaagagttacaaggtttttacaagatattccgttcgatcatctatgtctccattctgctggagtttttcgagtatgccattgacccggccatgcttgaccattggggcggcatactctgcgacatacacgggcgtatcaagcggtgggtaatctacaatgacgggaatctcgcgtatagcaagttagccacattcctgcttatatgcatcacctgtatagggacaaggaacaagaagaaactggagttcaatgcacggaaacaagttctttatcctattataataggtatggggctggttgtattgtctgtttggttgttcggatatccgatggaaacaaggctttacactttacggttgaacatctggctttatatgcttgcctcaataatcggtgtggtactggtacacattgcccttgacaacatttccaagttcctcaaagagggattactgaaagaccgtttcaattttgagaatgagagttttgagcagtgccgggagttgcaggagaacaagtattcggtcaatatccccatgcgctactattacaaggggaagttccgcaaaggttgggtgaacatcagcaatcctttccgaggcacatgggtggtcggcacaccgggttccggcaagactttctccattatcgaaccgtttatccggcaacactcggcaaaaggctttgccttagtcgtttacgattataagtttccgaccttggctaccaaattatactatcattacaagaaaaaccagaagctcggaaatctgcccaaggggtgcaagttcaacatcatcaatttcgttgatgtggagtattcgaggagggtgaaccctatccagttgaaatacatcaacaaccttgctgccgcatctgaaaccgcagaaaccctgcttgagtccttacaaaaaggcaagaaagaaggaggcggtggcagtgaccagttctttcagacatccgctgtcaacttccttgcagcctgcatctatttcttctgcaactggggcaaagagccatacgacaaggacggcaatatgctcacggcagagaaggtacaggacaaacagaccaaacggatgatacccaccggacgggtgttcaattccgcaggcgaggaagtggaaccggcttattggctcggaaagtattccgatatgccacatatcctgtcattcctcaatgagagttaccagaccattttcgaggtgttggagaccgacaacgaggtgacgccgttgctcggtccgtttcaaaccgctttgaagaacaaggcaatggaacagttggaaggtatgattggtacgctacgtgtctatacctcacgccttgccaccaaggaaagttactggatattccacaaggacggtgacgacttcgacttgaaagtttctgacccgaaaagtccttcttatctcttgattgccaatgacccggaaatggagagcatcatcggtgcgctgaacgcccttatcctcaatcgtctggttacacgagtgaacacgggacaaggcaaaaatatcccggtaagcatcatcgttgatgagctgccgactttgtattttcacaagatagaccgccttatcggtacggctcgaagcaacaaggtgtcagtggcgttgggattccaggaacttccgcagctcgaagcggattatggcaaggtaggtatgcagaagattatcaccactgtcggcaatgtggtcagcggttctgcccgttccaaagagaccttggaatggctgtcttccgacatcttcggcaaggtggtacaactcaaaaagggcgtgaccatcgaccgggacaaaaccagcatcaacctcaatgagaacatggacagtcttgttcctgcatccaaaatctccgatatgccgaccggatggatatgcggtcagacagcccgtgattttgtgaagacaaaaacaggaagcggtggaagcatgaacattcaggaaagcgaggagttcaagacctccaagttttactgcaagacagacttcgacatgaaagaaataaaaaaggaagaagccggctatgtaccgcttcccaagttctacaccttcaaatcaagggatgaacgggaacgcatcctttacaagaacttcgtacaggttggagaagatgtcaaggaaatgatacaagagattcagaaatataaagtgaaatagcttttctaatgggggcaaatcatcaggcattgcccccatattccaaccccaataatgctttatttttttctattttgagttttcttgattttaggcctcgttccattttttgatacgccagtgtcaatacaactactacatttacaatctgttagcaatactaaggtatgtggtaaatcagtgtattcatttttcaaatcatcaaaattagaacaattaccaccttttttatgaacatcaaatatccaaaatacagacaagcaagcacctgttgcattagtgtattgtatgaactttttcttatactcctgacgttcttttttatttttaagttctttattgtgaagcagtttaagctctaccataataggattacataaaccatatcgaataagaagatctgtacgcttattatcttgtagagtaacctcccgatctacacgaacagcctctaatcccatttggcagcatttattgatgacggtatttttcaactccctctgaataaaatcttcacttaaagcctcttgtcgtactaaagaatatataccttggtcttgtatttctttttgaacctcagaataaatataattaaaatatcgtcttaaatcgttatcgttccggatttccaaatgtgattctttgacgcatttattgtattgcttaatagctttaccaattgtaattttttcttttttcaaatacattatttcagcattatccataatgttgtttacgagaaaactcgcatttgtatcattaaaatacgccaccttttttcttaattctaatatataaaaaatattattggtatttataaagaaaaagcatatctgattaagaagatagcttgagtattcctgtgtctctgaagttatacataatgataagccaaaatcaaacaaatcaaacatttgttcaatcagtctctcattattttttatgctcataaagcatttgaacatctgtggatgtgtcatttctgattcttccttagaaaccgcatatacatacccagttttacgacaaagagactttacaacatgattttttaaatattcaatcctccatgtcattgcctctggatcttgatatttttcaatcattatgtcattacactgcatttttatgcttccaatactatcatcagcaagagaatcgaacaatgctctgtaattatttatattccaattacagtacccttcagatacaagagctaaagctttagatgcagcaatactgtgactaaagtcttgattggctttatattgttcgatatactcttccactttataggacaaagcatcaattccataatcggtaatacaggttaaaacatcctccgtactaatattcataaaatcatcttcccttgacttccaccattcgacaagttgcttcttctcatcatcactaatactacaaataatagacttgtatatttcctttatctcgttggccccagcattcaaagtacagcagacaacaggtaaagtctttatcaaaacagttctattttcttccaacactttacggaatcctaaccgataaattgcattaacaaaatacggtattttaattaaagatgtagatagattaaaagaattttcggatgtcttctttaatgtcatttcatccaaatttagttctgtgaaaaattttgcaataacatccacaaaaggttgaataaattcctgttgttgtataaattctacatttttagatacttcaaatgcagcttcatacttgtagaattcgtgtacatttagttttgaaaggatttgataagaatcaataagtcgctgatattcatgtgaatttgtttgactttctacttttttctttgagttttcatcccatcgttcaaatgtctctgcataacgttttatgtattcggatatagaaatgctcttaacttcatcatttctgattttactaataagagcagttagaatattgtctatatgccattctcctatctttatttcatgtaaaagtttgtctaaagaagatataagttcagcatcaacaatttctgcatcaaaatgtcgaaataaatcttctaaatcccatactctatcaaaactatcaataaacaaggatcctgttgttttctcaagcagtatttgtttaataataggattgatctctgtatagctcatatacagatgattattaatgaaactcacaataacttttgtcatgagttttttactttctaaatctatatcccacgcaatatgaaattgtttcgttaaatgccactcataatggatatgtaaagtcctattatgattaaaaaaatcaccaagtttattagcttctgtaatcttattatacgcataaataattgtaggaccatccattataaatagtactgcatttattgcatatgaatcacttgcatagcaactatccaaccagcaatctacaacattattatttgtaaattttccatagccggtcacttcacagtatttttctttcactctttcagtaaaacgactgtatgaaccagataatttgacaagttcgtcttcattttttagtgcattatacaaacttaaagccaccagttgtttttcctcatcgcctgtttgcatgagaatatttgctgcattattccaatggtcgaaaacttctttgctcagtttgtcatcttcggcaattacttccaatatagtacagatattcgttatttgaatcttattaagccgttctacagccaatattattttattattacaacttgaagtatagcattcttgtaataatccgcaaattgcccctctccagttaatatatacaggtacacgttgatagtggtcaaaaatgatgaagaataactcttctttctgttgaagagaaagaagagaagaatctatatatttcagcaaagtttcaaatggctcattttcaagattagattcatatgccacaataagttttagcacattaacaaatgtatgtattttatcttccgcatatgaaatatgaggaataacatcgtaccagtttatgtaaatacgtttcaattctttatgcacagcaacatcataaagtacactttcaatattgtcctgcctacataattctttagcagcaagatattcctgtagttcagtattttcaaattgcaatatcccatttgtttcttttaatatacgactctcaaagaataacaaatcaaaattagcaataagcatctgtgtcatattgccttctacttcatctaagaccgtatataattcatcttttgaaatttgatcctttctgcttatttccataatgaaagccactttttccaatactcgttgtataagaactttaacactttcattattcgtagtgttcggataaacatctatggctgtttgtattgaacggacaatcatatactcaaaaagttctccgacatttaaacatcctccttttttctcatcatactccaataaaaatgtcaaatatctaggaactgttagaagctcttttaactttgcgcttttactgatattttcgtttgttatattcgaacatctacaattaacaacatcacttacaatatgctcactcaacctgcataattcaataaaaattaaatcactgcaaactgagaaatgctttttataagatgccacataatgctttctacaagtaaatagcacctttgtttcgggattattttccctatattgtcttattgaaagtaaaacagtatggaatatatttccctcaacctcgtccaaggcatctattatgcagaaatcctcattggtcggagcggattctaaattaaatttagatgcaggacataaatacaaatgaccagaaatttgcttctttatttcatcaacaagccgactctttccaataccaggttcacccactatacaaacaaatttttcttgaagcaatttgtctattgacaaattttcttcgacaccaaacaacgaagtggttctgttattctctaacagatcatacacattttgatacctgactatttgaggtgtaatataattttccattctttatgtaccagtcttatcataaaataactatagagcaaagataaccctttttcctgatctaataatcatagataagcaggaatattgaactaattcgcaatttcaatggaaaatcatataacttgaatgatgtctgaataaaataaattcattacttttgcatggtaaggtaaataataaaccaaaatggaagagacgaaagatataaatcgaatcaaagtcgttcttgttgaaaagaagcgaaccaacaaatggctggcagaacaattgggcaaggatccggcaacagtgtctaaatggtgcacgaacacctcacagcccggattggaaactctgttgcagattgccaatgtgctgaatgttgatgtgaaagagttgttgaactcctcgttggaggaaagcatccagactgtcagactcgttaaatgataatacgtggatatgaacaaaacggaattatacaataagatagtgcagctcgatggactgacaaacgaagaaaagtcggaactgttgggcctgctgcgcaagcaaaagaagtatgggcttgtgtgggaggataagccggaggatgtggaggagcgtttgcgggatgagttgccggtattgatagaggatgccatgaaagccataatcagcgatgatgccaatgcaccgaaccatatccttatcgagggtgataacttggaagccctgacctcacttgcctacacgcatgagggaaagattgatgttatctatatcgatccaccgtacaatacgggaaacaaggattttgtctataacgactgtattgttgacaaggaagacagctaccgtcattccaaatggctgtcgtttatgaacaagcggttgcgtattgcaaaacaactgctgtctgaccgtggcgttatctttatctcaattgatgataacgaacaagcgcaattgaaattgctgtgtgatgaagtgttcggaaataataattttataaccaatattatatggcagtcaacagcaggctctaatacagggaatgaaattgtaacaacaacagaatatgttttagtctatactgcaaatcgttcaaaagctcattttgacggacagccaccttcagatgatacatttaaactaacggatgaacatatcaaagagagaggacattatactttggataaacttgatcgaagacgagtagggggacattattcagaagcacttaattttccaattaaaatgccagatggaactttacgatacccgggtggaggacaacaacagaatgaaggatggaactatttatggagtaaaacaaaagttcaatgggggttagataatgattttatcgtttttaagaaaaacaaaaatgaatgggcagtatattgtaagcgttaccaaaaagtagataactctaacagacaggtagataggacaacaccttataggaatctaatcacatcagatttgttcaacacagcccaaggtacagcagaaatagctaatatttttgctattagaccttttgcttttccaaagccatcaacctttgtgaaattcttactatcctcagcagttgtaacatcacctaacgctatggttcttgacttctttgccggctccggtaccacccttcacgccactatgcaactcaatgctgaagatggcgggcaccgcaagtgcatcctcgtcaccaacaatgagaataacatctgcgaagaagtgacctacgaacgaaacaaacgggtaatcaatggctacaccacacctaaaggtgaagaagtcaccggcttaaagaacaacacactgcgctactatcgtacaagttttgtcggcagaagccggagcatgaagaatatgcgtcaactgatgaacctctccaccgatatgctctgcattaaggaagacctctataccgaacagacaaaattcggtgaacaaccgacctacaagaatgtgttccgctatttcgacaatggcaagaagcgtatgatgattatatataaggaagaggccgtgccgctgttggcagaccttatccgaaagactgattacgaggggaagatgcgcgtgtatgtgttctcgccaagcgaagacccgtgggaaggtgaatttgaagaggtacaggacaaagtgcagctttgcgctcttccgcaggccatatacaacgcctacaagcgcatcctgccaaagaaaaaagacatcactcttgaacaagaaaacgatgctgccagcaatgacgacaaagcattcaacggtatgcttaattttgatgaaaaggaggacgagcaatgaacgagcagcaggataaaggaaacatcatactctaccaaaccccagatgggcaatcgaagatagaagtaaccctgtcgggcgatacggtgtggctcactgccgaccaaatggcagaactgtttcagagaaataagtccaccatctcacggcacataaaaaacgtgtttgaagagggtgagttgcaggcagatatggttgttgcgttttttgcaacaaccactcaacacggagctatcataggtaagcaacaaacgcatcaaacagccttttacaaccttgacatgataatcagcataggctatcgtgtaaagtcacatcgtggcgtccagtttcgtatatgggctacaaatgtactgcgcgaatatatcgtgaaaggatttgccctgaacgatgaactgctgaaacgtgccggaggtggcaactattttgacgaattgcttgcacgtattcgcgacatccgctcatccgaaaaagtgttctaccgaaaggttttggcaatctatgcgttaagcatagactatgacccacgggcagaagccacacaactctttttcaagaccgtacagaacaagatgcacttttccgctcacggacacactgccgctgaagtaatatatgaacgtgccgatgcagaaaaggatttcatgggattgacctcgtggacaggcgcaatgcctaaacgtactgatgcagaggtagcgaaaaactatctttcggctgatgaattggatacgctcaatagaatagtcagcctataccttgattttgctgaactgcaagccaagtcgcaccagcccatgtatatgaaagactggattcagaagttggacgactttctcaaactatccgggaaagaactacttacccatgctggcagaatatcggcagaaatagccaaacagaaagccgatatggaatatgataagtttaaggaacggaccatgtatgaactatcgcctgtggaaattcatttcttggagaattttgaaaaggaacagaaaaaattaaaggaatagacggaaaacaatgaagaatttagcatatcaacagaaagccgtaaccgaattggtagataaaactatccgcctgttaaaccttggagggcagcgcaataaattagtgttcgaggcgactaccggagccggaaagaccgtgatggcttgccagatgctggcaggactgatggacgaattgcacgaccgtggtgacagccgttaccaggaagtggcatttatatggtttgccccacgcaaactgcacatacagagttatgaaaaattgaaaggcgcattcgaggagacacgcacgcttcgcccggtaatgttcgatgaactggaccagaatgaaggtatccgtcccggtgaaatactctttgtaaactgggaaagcgtgaataaggagaataatgtaatggtacgtgagggtgattgttcactttcgctttacgaaataaccgacaggacgaaagaggaattcggcctacctattgtagccatcattgatgaggaacacatgttctggtcgaagacagcggacaagtcggctgccgtgctcgatagaatcaatccgactgtggagattcgtatttctgccactcccaaaactgccaatccaaaggaaaaggtcacggtctatcgtcaggatgtgattgctgcagaaatgataaaaaaggaagtggtgctcaatccggaaatagagctgaatttcagtgatgaactggaactcaatgccaaccttatcaaagcggcattggacaagcgtaaccagatagccgaagcgtataaagcggtaggttccaacgtcaatcccctgctgttgattcagttgcctaacgacaccaaagagagtatgacagccgaagatacagccatcgccgaccaagtaaagaaatatcttgaagtgatgtgtggcatcacaacagacaatcatcggctggcagtatggcttgccggcgagaaagagaatctgacagaccttgaaaagccggataacctgacagaggtattgcttttcaaagaggcgattgccttgggttgggactgccctcgcgcagcggtattgctcatcttccgcaaattgcaaagcgaccagtttaccatacagacagtggggcgtatcatgcgtatgccggagcagaaacattatcaaaaggagatactgaactccggctatgtgtttaccgacatcgcaaaggacaagatacagattgttacggcggatgccggatatatcttgaacaataccattaccgcgcatcgccgtgagaatctgaaaaatgtaaacttaccgtcaagctatacagaacgccccaatgtagaacgtaactatttaggcccggacttccgtaaggtgttacacgaagaagcccgcaggttttgggactttgtggaaggcaacttgctgttctcgttggaggagttggccaagttggataatgatgaagaaagcaatacattgccggatagcgatgaccttcaaatcaatgaaaacaggaaaaaggtggctaactccttgcgccttgatgtaaagaacatcaatatcgagataccgcaagatgtacacttccaaaatgaagaacaggtgctggaagttgatactgtaaaatacgcgagaaaagccacggagatagaccgtgtgtttatggcatacattgccactaaaggccatcagttcgagagcaaaggaagaactgacaaaatagcaagttacctgttagagatacttgccgatttctttggaatctatgagacggaagccaaaaaagtggtactctaccattcgaaccgccccaaattcgaccgtatcatcgactccgctttggaaaggtatgcccgtatccgtgacaaggcccgcaaagaatcggcagcaaaaagagtattcaggaaatacggctgggaagtgccggaagaacggacatacgataacgaaacaagtcacatagaagaaaccggtaatcatgcgctactgccatttgtgcaactcaatcaggcttcgaatccggaaaaagattttgttgcctatttagaacagaacagccaatacatagactggtggtataagaacggggataaaggcaaacagcattacgccatagaatataccaccggagacgaacaggcaaaatcactcttctacgtggattttgtaatccggatgaagaacggacatatctatctgttcgataccaaaagtataggcagcgatgtgtttgcgtccgacaagcataacgccttgttgcaatacataaaagaaaacacaacggaagaacagccgctctacggtggtgtcattcttcggaaggatgaaaactggttgttctcgccgcttcccataaagaacactaccgacacattgaactggaattgtttctatcctcaaaacgcatgatgattatggcaaaaggaatagaccccaaatttgtacactatggcatccgaaaggatgacttggctatgatagaggcaatctgtgaaaaagaagagattgactttgattggcttagtgaagacatacttaaagcgtatcacgctaagaaagtagatgtgatagaaatgagtgacaacgatacggaagagattatccgtaacgccattcagaaaattcgtcaataaaatttagatgccatgctcatacagaaaataaaaataagcaactataaaacctatctggccctcgaccttgatttgacggtggatgatgacaggccaatcatccttatcggaggatcgaatggtggtggtaaaacgactctatttgaagccatcagtggggctttgtacgggttgaaaatagagagcaaagaacatttcattgaattgctcaatcaaggtgctataaatacagcgaagccggagataagtctgcaaataacatttgtaggcaaagtattaggacaacagcaaaaatacatcttgaaaagaacctacgtgcttaatccacaaggaagacctctcgaaagtgtctctctcaacatgaatggcaatatgtatgtgtatggtaccatgacagccgccaaagacagactacgtgccgaacaggagataaacaaaatcatcaaggctaatcttccccaggaactcagccaatatttcttgtttgatgccatgcaatcgagcgaactactgaaaaagaacgtctttcagcaaaccattcgagataactttgaaaacgtgctcggtttcaaaaaatatctacaactaaaacacgcatcagaaaaactccagcaggaatgggcgcaacaacgtttagaagcagaaaaggaagcaaaggaatacaatgccttatgcggtcaaaaggaacagttgataagtgagttgaatgaatgtcttgccgaacaagacaggctgtacaaatatatgacttcggtagaagaagagtatcaacgtgcaaaagaaggtgcgcaacaaacagccaacctgaacaaacgcatacaagacattgacggcaaaataaaaaacatcactgacgaagctgcaaattatgcagaggtcttgaagtcgtttgtagagaacattgaaatcaatgtgttcctgcccaaactggcatcaaacctgtcgcaggaaatcaacaatcttctccgtgtaaaagagcagctacaaaaacagaataccggtgcctatccgatagaaacgttacgtgatgtaacctccaaaattatagaatatctaaaagaactgtccctatgtagtcatgcggtggatgaagaaaatgtagtagcacatatggtagctttacagaatgctaccaatacagaagatccatatgattatttagacgattcggaagtaactgctcttcgtgaactgcccggcaaaggcggtcataaccagttcgtttctatcgacagaaaaagacaagaattagaggttcaattagcgaacatagataatttgaaatcagaaaagcgcacattggaacagactcgttccggtggaaatagtatgctgatagccaattatgaggaagccaaacataatatagaaaagcaaaaatcgctggaaggcaacttgaaaggcgaaatccaacgtttggagaaacgcattcatcaatacgatgtacagatacagcaagagccggatttgaagtatgacacattgatgaaacttcgtccattcttcgacaaagtggcagatatgcttttgaaaaagaaaaaagcacagatagaaacggaaatgcaagagcaactaaacaagttgcttgtttcctataaaggacatgttgggcgtgttgagttatccgatagtatggaaaaattcaatattaagctataccatacagccggaaatgaaatctcattgaatcaactcaacgctgcatccaagcagatattcattcaagttcttttgaaagtgcttcgtaacttaggcgactataatccaccggtgatgatagacacggtgatgggcgtacttgataatgaaagccgtgatgcacttatggaagagtatttcccgcagttggcagaacagacaattctgttgtgtaccacttcggaaatcagaacggacagcgactatataaagttagagccatttatctcaaagacctataccctacataggaatgtggaagagcaacggacaaccatagatgaaggctattttggtatcacgcttaatcagtagtaacgacatgagtatcatcaatttttcaaatacacgtcaaatggaaggtctgctggatgaaatcagtcctgtcaaagatctgatggagaataaaatcaatctgtctcgtattgtggacagagaaaagcgtgtgagtcttaccctcaataaggtaatgagaatctgtttcattgtgggactgagtattcctgccgagcgaaaagaggaagaatttaaggacattcagctttcaacaagttctgcacgtattgtccccagtttctttaccatgcacgacttgtcaaccctatatgcagctcttttgaaattacgatattcaagtttgaatattgactggacccagaacgccaccctttcacgtatcatagcagcggaaatgcttcgtggtcgtgattatctgataaaagaaaacaatttggatacatatttgtattctatgggcagcaaggtggctatgacaaaagacattccagtgcttaatctacttgtgggtaactatggagacgaggaaatggaagcgaaccttgacatcaacagccgcaacattaccaactctcaaattatcatagctggagctaccggatctggaaaaacaaacttgttagctgtattgatgcagcaatttagagcgttgtcttccgaatcgcaatatcctgtaaattttctgttattcgattataaaggagaatttagcgatatccaaaacaatcattggctctctcactttgatgtggatcgcagttgcatacttgaccccatcgagcatccgcttccattcactccgttcaaagactttacagggcgacctatcaacgaaatcaatctctattcgtctgaaatggcatcagctctctgttccattgacagagtttcggcaagtgccaatatgaataaccggctgagtgaggctattgttgaagcatataagaaaaccagcggatcgcctatcacattcacaatgatgttgaaggaatatcaagctaaaatgaccgaccctgcaaaagacgacagtatttcgtctgtacttaaacagttggtacgagccaatatatttgaggaagaggacaaagctgatttgattggtgattgctatatcatcaagatggatggttatccgaaggacgggcctattgccaaggcaatcgtgtacttcttaatctctaagctgaataacatctatgaacagttagaaaagcaagcaacaaacgacgatgtggttcagatacgccatttctccattatagacgaagctcactatatgcttgactttgacaatcgtcctctgcgtaatctgattgccgtaggtcgaaataagggattaagcatcattcttgccacacaaaatatgagtagtttcaagagcaaaggatttgacttttatgccaatgctcaatatccgctcattatgaagcagcaaactattgatgacaaggttatcaaggatttatttggtgtaagtggcaatgaacttcaagaaattcgcactgccattgctgggcttcaaaagggagagctgataatcaaagaccaaatggcttttgcactgagtatgggcaaaaagtacaagaaaatcaatgtaacgcacttgatataagcaagattagattatgataaaattacctttcgaaataatccaacttttgtggagttgtggaaacaatcgagttgagcatcttaacggatttgctactgaatttagtgaagctacatttgatattgtttccacctcaccctttgttatacgcgcaaataatacagaaatacttcttacgcgagatgaaaatgatcatagtattgatggttatcaatatgtcgtattaacaaacaagatacctcgcaaaagtgaatttcttagaggaaatattttatctatcagatggattaaacaccccaaaatagacaccttacgtcctgaggaaataacagcttcttggagaggtaaattcctttataagaaggaaaatattcaagaatccattttagggcttcgtgctccgcaacttggagctatatatgcgtttatgtcaaaggctcaaattcatcatggcagaaatataatagtcatgccaactgggacaggaaagacagaaaccatgttaagtatcctcattgcgaatcaatgtgccaaagtacttgtaactgttccatctgatgcgttaagagaccaattagcaaataaattttttactttgggcgtacttcacaaatttggaatagttacaagtgattgctcttatccgaatgttggtattgttaaggaaggtatggattataatggttggtacactttaattgaaaaatcaaatgttataatcacgactatgcctcttattacaaattgcgaatcggagattataaatttattaaaggaaaacataagtcatctatttgttgatgaagcacatcactccgaagctaaaacatggagcgagttcatcgactcttttgatgatgaaaaagtcacactatttaccgcaactccattcagaaatgatagccgaagattaaaaggagattttatatataacttttccttaaaagatgcacaatcgcagggatattacaaacctataaaatttattccaataagggagtatgatttaattcaagctgataaacatatagccgaggtagctgttaagcaactccgttctgatatggagaatggatacgaccatattcttatggctagatgcagtacaaaacaaagagccaaggaagtaatggagatatatcagcaatactctgatttaaatccggtgatggtatttagttcaatgccaaaccaaaaatcaattttaaacaacataaaagacaaaaaacataaaattattgtctgcgtaaatatgttgggagaaggatttgatatgcctgaattaaagattgcagcaattcacgacgcaaagcagagtttaccaatcaccttacaattcataggtcgatttacacgtacatcatatgattctaaccttggaaatgcaagttttattacgaacattgcatatcctccaatattggaagagctagaagaactatatgctaaggatgcagattggaacagcttgttgccactcctaaatgatggaacgactgaacaagaaaaagattttaatcaattcatccagtcatttaacaatttggaattatcaaaaattccattccaaagtataaatattccattaagtgcagtcatatatcgaacttcaaacacgtggaatcccaaagcttgggaaaatatactatctcctgagatttatgattatcgtttcggaagtagcaccacagatggagatacattagttgtaatcggaggcagcattgaaaatgttgattggggtaatgtcgaatgtgtacagaatttactttggaatattcttgtcattcatagatattgtacacccaaatataaccacgcctacgtatatagtactttaagtgaaacggatgagatagtaaaggcgatttttggcgaagatgatacctgtaaaatttcagggcactgtgtatttcgtgtcttccacgatataagacgttttgccattgttaattttggaggaagaaaagctcgaatgggtaatgtttcgtttaagtcttactatgggaaagatgttcaagaaggtatttccatgactgagcaaaaacaattaacggcgaataatttgtttggtaacggctatagacgtggagaaagggttagtgtaggttgttctgtaaaggggaaaatatggagtcatacaagaggtaatctacttgaatacacaaaatgggctagaatgattgggaagttagttgaaaatgagaaaatagatcctaattcttttatcaataacactttaagagttcaagcaatttctgaattaccccaaattgcacctattgcaattgattgggacccggaattatacagagattacccagagcatggaatattcttatctcataaccttgttgactatcaattatggtatgctactattgaattagcggattacgagataaagagcacaattacgtttaatatacttattgaggattctaaattcacctatataatcgagtattccgaacaggatagccgcccaatatatcgcgttaaacagatacggggaaataaactaaaaatgagatatggtactcgtctctatgatgatatttgtgattattttaataatgacgatgcagcacctgttatatattttgctgatggttcatgtctttatgctaataatttagtgcgtgtaaattccgatattatcccattccctcaagaaaaattgataggtatagattgggcggatactaaaattgaaaatgaatcacaacatgtagtaccttatgagacggactctattcaatactatttttcaagatacatctcggaaaaattcgatctgatttacgatgatgacggtagcggagaaattgcagatttaataggattcaaaaatgaaaataatgcaatacacatgcatttatttcatctcaaatacgcacatggaggaaaaataagcaatatgatttcaaatttttatgaggtttgcggacaagctcaaaaatgcttaaaatggaacgatagagataaaagtcgccaattatttaatcgtctttttgctcggaagataaaaaaatatcaaggaagagaatgttctagaatactcaaagggactgaagaagaactcgaacaattaagctcacaggtgaactggaaaaaagatctgattatgcacatcaatattgtgcaaccaggattaagctgttcaaatccaagcccagacatacttaatttgttgggttgtgtctcttcatatattaaggatgtatcaaatattgatttgaacgtatattgcaatctataaaaacattgttttaacaactataggatatgaagccaatacgagtatttttattaaaagggaaagaaagcatgattgaccacgtaaagagcatccaaactttaggatgtgcttactggaaaaagtctcgcaataaaaaattggaagttggggatatatgctatttatatcttatcggtaaggggcattatcaagtacgctatcgtcttgaagtcgttgatacaagttgtgttcgtgaagatagttcttgttggattacgccatttcaggctgatgaaaattgttataaactaataccgacttttacaatgtacgaaggcaaggaattgtcattagatacattggaagagatcggtatcaatcgacacacgcaattcaaagagctcaatgaatttcaggaagattttttaaacaagtattttgaatgatatgagtatgcccaatgatacaagaccacaaattatcaacgtgacacgcaagccatcaaaatgtccggtttgtggcagtgaagtcgttgatattgtgtatggcaccggggatatgacggaaatggatttcatgcttgaatatcgcaagaccgccattatgggtggcgacaatatacctctccgtccacctatttggtgctgttcgtgtggatgcaaacgattcagaaaagtaaacgaagacggaacggatgctcctgtaaaggtgaaaatgttgaaaaacatccgcaaggcaccggtgtctaaaatcatctggacatcccaaatgacagaaagagcattagaaaacgattgcatttctgtgatacatcaataccagttagagattaccaccgaacttgacgagcatgagaccttgaaagtctcagcagtgagcggcagtgatgcagaagaccttgcaatggaattggttactaaaggaatgataggacttaaaggtcgtaagtgcgtaaaaatagacacccacgtatgattcatccaaaagatgggacagcgtcccacttattggattgggactgaatataatcaaggactatacaaggattgatataatctcctttatgacgaatggtcagatgcagatgttccccggtgctgcggcctgtactgccggttatgcctaccacttcccctgccttgactattttccctttcgacacagaaacctgcgacaggtgacaatagctgacggtgaagttgccatgttgtaacgtgacatactttccggagactttatcctgtcctaccttcagcactctcccctgcatcatggcaaacaccttggcactccgggcatggaggtcaataccgttgtgaaacttcctttttccggtgaacggatccttgcgatagccatatggtgaattgatcttgacatacgagagcggatagcatacgctgagatagcgtgctacctgctctttcttttttgagtccgcacttgacaaagcaaccttgtcgggtacggacttctcgttttcagaggtgatgctttcgggtgtcgcctctgttccgtttgacgtccgggatggggtttccacagcgactttatagtgattgcccggacaggaaaccgtgttgaactgcgctttcacatggttcccggataataacaaaagaagggctataacgattcgtgtattactcatagatgcaaatgtaggaacagttctccgaccgtgccaaaagatgtcttgatttacctccaaaatataacattaaataagttcagagtatgaatactgcattataatcatacttaaagcataaataaacacaaataattaggctatttagaactacactaattgaagtatgaacaatagtatatacctttgccaaagtataatcaaaatatcatattaaagtatgaaacaagtacgatttgaatttgaagaactgccttacgaaactctctcgcagttcggactcacacaggaaatgattgaagaccttcctatgcgcattttggaagaactcagtcacggcaggcactcgcctgtgcttcccatcaaggtaaacgatgataacggaaacacggtcaccgaccatagccgattcgctttcgtgcgcaaggagaacggagaagccgatgtcgtgttctacccggtgctgaagaaatcctccttggagaagtacagcgaggaacaacagaagcagctccgttccggcaaagtcattcttgccgacacggtaacggctgacgggcgaaagacaaaagccttcgtacagatcgataccgagaccaatcaggtcatgtccgtccccacgcaggtcatcgcccggaaccttcaggtgatggcagaagaactgaaactcagcaatgccgaaatcaaggtgatgcagcagggcgaaccgctgacctttgtgatgcaagacgagcctgtaacagtcggcatcagcctgcacgagaaggacggcatccgcttctgtcagggagacgccaagaaatggaacgagcagaccaaaagagaatgggacaaatacaccttcggctgttacggttgctggatgatggacgatgacggcaatctcgactatattccggaagagcaatacacggaagaactctggaacgaacagaaaaagagtgcccaacgcaatatgggtgctggacttcacaagtaaaacctttcaaacactgtaattatggcacaaaacacctattatcccgaagaagtgctcatcgagaagatggagcgcggagaatacggctggctggattacgtcaaccacttttctgccgaatggcaggaagaactggtggaatactgcaaggcgcactcgctcacgattgacgatacggcagccgagcaattcgtccactacaagagtgaacaattagaagccgccatggaaagcggtgaagcataaacacggactatggcaatacgaaccaacacaaacccgatgagaccggacttgcaacccgaaatgcgtgctcttttgatgcgcaacggtatgcaagcccatgtcgtacctgtgggtgacagctaccagctggtagtacaggggcacgattccccactgttacgataccccatcagcaggcagcagatgcaggccctgaccgactggggaacgaaccatgccaacaagaaagcctacgagaccttcacggacatcgtaaaggaggattttgatatgccccgcaacttcgtccacgcacgcaacgccaacggtcgtgtggcaatgggacttcacggctaccgtatcggcatcggtgagtatggcagggtcggcaggtacggtatgccgccccctttcctcggatggactcccagacagcaggaaggctatcacttgcgcagagtcggcggccggcttttctatgcaggtacacctatggtggcagaacgcccggacgggcgcatgaaacccggcgaattgcaatcgggcggttacggattctactacaaagggcatcggcaaccgcaagagcaggtacagccattccagcaggatgtcttgcaggatttgcaggcagtcatcaccccgatggtaaacaagccaagaagcgaagaaccggcaaagccttacaaggagctgattacctcacccgtctatttctccaatgagaaatggcaagaatgcctttcgtcacacggcatcatcgtggatacggaagccggaacactgaccatccagtcggagaaagtcagtgccgatatggtctatgacctgacagaagaggaattatccgcactgacctccaattccattgaagagcatccggttgaaaaacgcctggagattctgaacaatgtcattcaaaatgactattccgataaggtcacattggaatctctgaacagcaaggagcgcatcagcattgccctgcatcccgaagtggagcaggatctggctatgcggaaccggcaggaacaggacttgctcctgccattggaatccgataacagccttgcaccgcactctaccgaacagaccgtactgcaagaagacgaacatatcatcagagaaccacaagaaggagccttgattgacggacgggacttgtcatacatcaacgaaaacaaaggctggtaccgggaaggagaacacggacgtgaagtggaagtggaagccatcgccgtacaaccagcagaaacagagggcaaatacaagatgaccgccattatcaacggagaacccatcacccatgaaatcagccagaaacagtacgacaagttcctggcagtcgatgactaccaccgcatgaagctcttttccaagatattcaacgaagtggatatgaagacccgtcccgaaatgagcagcggattggggacgaagatattcgccgcacttgccgcaggtgcggttgtgttgtcggatgtcgcccacgggctgcaccatccctgtccggaattttacggagagcgtttcagttccgcacctcgtccttatttcaagccgggagtggactcgccgatggatgtggcagcaaggaactttgaagcgcagatgaacaaggaggtggcagagatgcgcagaggattttaaggaataaaaggaacacggaaatggcaaacggagaactgacatacgatgacttcctgcaacggctagacattcaggatatactgatggacgcaggctatcacctgaacaagcgtgacggcttgcgttatccgtcctatatccgcacggacagcaacggcacacgcatccggggtgacaagttcatcgtcacaccgaacggcaaatgctgtttccagccaccacagcaaaagctctataatatcatatcctttatcaaggcattccctgagaagtttgcggaacaccggaacggcgtctctccagacaggttggtcaaccttgtctgcaacaggctgttgaaccagcccatcaatgacagacctttgcgtatcatccaacccagacaggagaacactccgttcaggctggatgattacgacatccaccgttttgacgtaaacgacagggagactcacaagcgtttttatccctacttcaagaaccgtggcatcgacatcttcacacaacgggcttttgccgaccatttctttctggctaccagacaccgttcagacggtttggcgtatgccaaccttgcctttccgctggtacttcccaaagagccggacaagattgcaggactggaggaacgcggccgtcccaagatggacggtagcggaagttacaaaggcaaagccgagggcagcaacagcagcgagggcttgtggatagccaatttcagcggtgagcctttgcaaaaggcaggcggcgttgcgtggtttgaaagtgcctacgatgcaatggctttctaccagatacacaggaatggttttcgggacaaccctgacctttccaagaaaagcgtgttcgtctccacgggtggcactcccaccgatatgcagattcgcggtatgctttccgtcactccggatataaaccactacttgtgtttcgacaacgacagtgccgggcgtgagttcgtgaagaagttccaagccatagcggaatccatgcacatcaattccgaccgtataaaagtctttcccttgatgccctgttacaaggactggaacgatgccctgcttggcaagacaagcgaggaataccttgacagcatcaaggacgcgattatcccattgggggcagcactcggtacaacggggtgtgcaactgacaaggaagaagaacaccgacaaccaaatatacacagataagagccatgcaacaaccgatatacagagagatttcactacgaccgcaaacggcacagttcttcatcgacgaactgcccttgctgttgctttgtcccgtgggactggtctatggaggaatggagaacgcccctcttgcatctatcgccaccctccttgccgttctcctttccctcattttgatttaccggcttatatacctgaaacgcatacgctatcacatcggtagcgaacagctgactgccgagcatggcgtgttccaacgcagtatcggttacatcgaattgtaccgtgtggtggacttccacgaacagcagagcttattgcagcagattttcgggctaaagactgtcacggtgttgtcaatggacaggaccacgcccaagctggaattgacaggtctgcccaaacgaatcaatatcgtggatattatcagagagcgtgtagagtttaacaaacgacgaaaaggaatctatgagatcaccaatcactaaaataacgatgctcctattcggcatcatcttgtctgtcacggcgaaggcgcagattgtcacgaccaatccgttggaatatgtggcattggcagaaggcaacgaattgattctcggcaaagtaaaagaccagatggacgggcagaagaaaaccgcccttttgcagaataccattgccgcagagttcgagcagatgcgccagtgggagaagaaatacaacagctaccttaaaacggcaagcggtttcgcatcctcgctgaaagcctgtacccacctgtacaatgacggtgtgaggatttttatctcgctatgcaagttgaagaaagccatcagcgacaatccacagggtattgtcgccgcaatgagcatgaacaacctgtatatcgagaccgcaaccgaactggtaacggtattctccctgctccgtgatgccgtggcaaagggaggcaaggagaatatgcttacgggagcggaacggagccagaccctatgggcattgaacgaccaactgtccgcattccaaaagaaactcaacctgctttacctgagcatcaggacttacacgatgactgacgtgtggaacaacgtgacggcaggaatgctggacaggaacaatggtgaagtggcacgaatggcaatgaacaggtggcgcagggcggcaacggtaagataaaaagatggaggaaagagaaaatgagacgggcaatctttatcataatcacactgctgtgcataggcgtgaaagtccacgcgcagatagaccccacccttgccggaatggttctcatctataccgaaaagtccaagaagaccttgaagaaccaagagaaaatcatgctcctgcaaaccaccggacacatctggacgaaagaggaggtggaagccgtcaccgacctgcaacgggagttcaatgattatctggattcattccgttcggtcatcagttacgccgcacagatatacggcttctatcacgagataacccatctcacggaaaacatgggagagttcaccgggcaactcaggaaaagtcctgccaatgccgtggcagtagcactctccacgaaccggaacaagatataccgggaactgatatacaactccatggaaattgtcaatgacatacgcacggtctgcctgtcagacaacaagatgacggagaaacagcggatggaaatcgtgttcggaatccgtcccaagctgcaactgatgaacaaaaagctgcgacggctgaccatggcggtgaaatacacctcgatgggtgacgtgtgggcagaaatcacggaacgggaacaacccaaagccaacaaagcagagatagccaggtctgccatgaaacggtggaaacgaagcggaaaggccggtgctttttaacataacgggaatataaaaacaaaaagatatgggattctggagttcattattaaagacaggcggtaaagccgcaggagcgacaggcaaagccgttggtggagccgtattgcacccatcacagaccttgcgaggggcaggaagcgcattgaagacggcaaccgtaggagccgcggccggatatgtcggctgggagaaactgaccaccgacaagagcgtggtgcgcatcgtgagcgatgccgtcataggagaagacaccaccaacgccatcagcggcacggcgaaagcggctaccgaaacggtaaacaaacttaccggcaaagccgaacagacttttgacagcgtgagccaagcgtcaagttcgctctcttccacgctcgatggagcgtccaattttttaagtggtgtttccaacgggaatgccgggaatatgttaggcaactttttcagcaacctcgcgcatggcaaagtatcgggattaagcatagtcggattgattgctggggcattcctcgtgttcggacgtacaggctggctcggcaagatagccggtatcttcttgaccatgatgatgattggcaacaacacccaacgccagcaagaagcgtccgttaccggcaatcagcgtcaagcccgtccacagcaggaacaggaggaacagacccatagcggaggaatgagaagataagacagtcataacacaataatattctacaaatgaaatacacggaagaaatgattctacagtccccaagcggctattgtatgccctttgaggaagaaaagaataaagaagtaaccttgtcaaaaggctacggggaacagaaagatgccgtcaccagagagacatcctttcatcacggcataaacttccatgccagtcaccgccctttggcggcagtggcaagcggtgtcgtgtcaagtatcggtacggacaaagagcatggtgtatatattgtcatacgctatggcaaatacgaagtgacctatgcgcatcttgctaatatattcatccgtttcggacaaaaggtaaaagcaggtcagacggtagccatcagtggaaatgatcttcacatggaagtggcgtttgacggcgaggaactgaatccgatagagttcctgaccatgctttacggtaatatccaggcactcggcaaatcgggacacagtgcggcacacgagttcactccgtttgacggtgagattaaaaccaggtacgaccgtgacaaggaggaaatcgaggaactgatgctccgcttccttcccgtctatatggaagacctgttccgtggcgagtacatcgtacccgaatatacagaacagtccctgcgtaatgtgttcaccgtgggagcggccaagaactacttctttgagtcgatgccgagcatggcaaaccctttgggcataggcagccgtgccttgcctttggccggcaaggtacagaatctcctgatagcggactttctcaattatctcgctctcaggcacaatgtctatctctctaccatgagcgaggaagtaaaaaaaaacttcaatccgaggcagtagccagcagtggcattatcgacccgttgtcggaactggagatagacgtacagagcttcgatattccgagaatggtgtccgtctatcccgaccgtgccggagtccgatggtggacgaaagcatggttcaataaccgggaggaaggcgaacattccgtagaaatcgaccggatggccgccatccgtttcattcaggaccggatagaaaaggatgaatggctggaagagttcttccccaagcagatggagatataccacaacgccatagaacaaaccaaggaacaactgttgaaccaattgaattattagaacatgggcgaaatcaagcatacagcacgctttgcggagatagaaaggatattcggtgactacttcaatagtcaccttgcccctgtcatgcgagacacgcagaactatctcaaccgcaaacaaacggaagaaatggctgcatattccaccagtacagccggtatcctcggttctatggcggcagccggtaatccgatgatggatccgtaccagacactgagagtgaccggggaatggaactccaagaccacggaggactatctggaaatgtgcagggagaagattgcaaacaataaggagatacaggcagacctcgcattgttggcaaacgagtggcgcacaaccgtggtggatgaaatcggcagggaaagatatgatgaactgtccgggcaattagggtgcgacctcgcttacgcatatacggaataccgtatcggagagttgatgatgggcaagatggtcaaagacaatatgcccaagtcttccgctgaatacatcatgcgcaaggcggcacagaacacacttttcgggctgtcatacacattgaaccagtcaccgcttgccgcagaaatcgagcgatgtggggaagcagcctacaaaccgtccaaactggaaaaagggacaggcaaagtcatcggtgcaagcatcgatgccatatcactcggcggtgcgggaagctgggcgagcttcgccaaatttgtcggggctgacctggcattttcagcactgacttcctccaaggacaaaacaggaaacacagcatccgttgaagattgcatcagcaagggcgtattcggaagtgagaggaatgtctttgacagattccgtaaagaagccaaggaaattcgagccaatgacaatccttatatcatcgccaccaatgaacggctgaccaagaagattcccgtacagagttttgatttcagggactggatgagccataacgcccaagcgaaaatgccgtttgattttattgccggccaaaagataaaagatgagcgatacaaggatattccgatggtcatcgctccggaatacatggaaacttatttgcaggatatggagaagaaagaagaggttaaaggtcaatccgcgcttgcaagcaatccgggacaatcgggaaacacccataccgcacaatccgtccaacaagccaatgaaacggaaacgacggaagaatcaagggaagaaacagccattgaatcaggacagaaccgacaggcaggacagcaaaccgccaatgccaacgaaaacggctggggcgattttttctcaaccttgggattgagtggcatgggagacataagcaaaaatttgggttatgtgcttgccatgttgccggatattctggtgggtatgtttacgggcaggacaaaatcattggatttgggagacaatgtactgcctatcgccagcatcgtcgccggcatattcattaagaatcctattctcaaaatgatgatgatcggactgggcggtgccaatttgttgaacaaggcaggacacgaggcattaggatggaaacggaatgaagataacggtttgaatacgggaaaccgttccgtccgataccgggtctatgcagacgaaccgctgaatccacggatttccggtccgatactgcaagggaacaaccttatcgcaaccatagaccatgtaccctgcaccatccagttgcctgaaaaagtggtgtcagcttacaatgccggggcattgccgcttaatacccttgccaatgccatccttgtcaagagcgaccatacccagcaactgatgtcgcagaattacgaagagaacgacagggaaacgattgtgcgtaccagaggaatacaataaaacagcaacagatatgaaagagaaatcacagtttgagaaaaatgccgccgacaaacaagtggaactgctctccggagcgttaaacggggcggtcagtgcgggcggccactggctcaatgccacaggaaagggctatcccaagttttatccggcaggcgtggcggtcagtccgttcaacgccctgttcatggctctgcactcggacaagaacggatgtaagagcaacctcttcaccttatatagcgaagcaaaggcaagaggcgaatccgtcaaggaacacgaaaaaggagtaccgttcctgttctataattggaacaagtacgtgaacaggaacaatcccaacgaggtcatatcaagggatgactaccaaaaactttctcccgaagagaagaaccgatacaaaggcgtacacaacagggagatacgcacattgttcaatatcgaccagactttgctgccccacgttgacaggaaagcatacgatgacgcattggcaaaatacggcaacagtgtcgagcaaggattcggggaaaaggaattgcgtgagctcaggccgaaattcaatgccttcgtacagtctatttcgagaaatctggcaccggttcgcacggatggcagcggtgtggcgcattatgacagccagaaagacgcgatatatattccacggcaaaaggatttcgcacattacatcgattacgcgcaggagacccttcggcaaatcatagcagccaccggacaccagcaacgccttgcccgtgagggaatggtgatgaaaaacgggattcccccaacagaggatgccgtcaagcaggaacggctgattgccgaaatcgcttcgggtatcaagatgctggaaatgggacttccggcccggttgtcggacgagagtgtcaaactggtggattattggaaccgtgaactgaaagagaacccttgtctgatagatgccatcgagagcgatgtgaacaatgcgctggaagtgatacgcaaagcggaacggggcgaaaaaatcgagtatgccacctatcgtaactaccgccagacagaacagatgcgggagcaaatgcccaagcatttcttcgtggctgacgaaatcaagaagcatcccgacaaggaaaacaagaccattgtcctggtcatcgacaaacaaggcaagagtgccgatgtgatactccctgccggtgcatccttggaggtgaacaacgaaatcaagggaatgagcaaacagcgcatacaaagcgcattggagaaaagcggcattgaaaaagtgcgtttctataatccggacggtgcgttgggctaccgtcccgatgaccgttacttcgccgaaaagcagatagaggtggcgcgtctgaaaaactgggcattggaaacactctccaccatcgatgcgcaccctgcggtgaagcatgctgacaaaccctggtttgagaagatacagatggtacaggatgacaaaaaccgctgggctttattcatcaagccggaaggaaaagccggttacagcgtctatcccgaaaaggatgacctgaaccgtttcttcatcacgctgaaacagtcattggataatatagacaaggtgcgtggagaattggccagaaaatactatgcccttgccgagagcaagccggatctaaaagtggacctgttccacacggcagatgaaagcattgacttgaaccgcatacaacgagtggccgtgttcaagacaaagaacggggcgatactctgcgctcccaccattgacaaccagaaaccgcagccccgaagcgtcacaccacagcaatggcaacggatgtgggtcgccgaggacaggaacagtttcaaacaacatctggcggcaacgcttttcgcggacgtgctgaacaagagccaggcacaggaacagacctcttccgaaaaacaggagtcggaagtggaaacgaaaatcagccgtgacgaggaaatcaagcacgaccagcctaaagaggaagttgaagaagaggaagaggtatcaaaaggaatgcaccgataaacagacaaagcaatgagcaagaataaagaatatgtggagaaatacgccgagtttgcgatggaacagatgcgcaaatacggcatcccggcttcagtgaccttggcacagggcatactggagagcagcaacgggcaaagccatatggccctgaacgagaacaaccattttggtatcaaagccactccggggtggattgcgcaaggtggcaaatacggcatttacaccgatgacaagcccaacgagaagttttgcagctacgacagcgtgggcgattcttacgagcatcattccaaattccttgtagagaacaaacggtacgcggaatgttttgacctgtctcctgacgattacaagggttggacgaaaggacttgccaaggccgggtatgcaagtggcggcaattatgcccaaagtctgcaaaaaatcattgaagcaaacgggctacagcagtatgaccggatggtcatggcagaaatgaaggcaaaaggattggaaacagaaaccgggcaagcggttacgacaaacacctattcattcccggtcgagcgcgaagagttcctgtttgtcacttcaccgttcggaatgcgtaccgaccccatgaatgctgacaagctgcaaatgcacaagggtatagacatccgctgtaagggcgatgcggtgttggctaccgagaataacggcaaagtggtggcagtaaaccaaaatgccaaaaccgccggaggcaagtccgtaaccattgaatacgagagggctgacggaagcaagatacagaacacttatatgcacctgtcctctgttgatgtcaaggtgggtgatatggtgcaagccggacagagactcggtgtttcagggaataccgggacacggactaccggcgaacacctgcatttcggagtggcacagattaccgctgacggacaaaaacgagacattgatcccgcaatctatctggcagacattgcccaaaagggaaacatcaagttgcaagccttgcataatggcaacgacctgttggctaaatacaaaacggaggttactgccactccccaggaaacaaaatcacaaagtcctgaagagtggatgaagaaactgttatcctcggaagacagcggtgtcggactttcaggaacgaatgacccgattatggatatggtggtcaaagccttttcctcgctgatgatgctggcggtagtcattgacaacaagaacgaagaggaacagaaagaagccatttctgaaatggcaggtagccggaaggtggaactgacttcattgttgccccacatgaaaagttgtgcccttgtcatcggagagaacaacaaagccgtattgcaggcagacaacggtatcgtgcaagtctcacgggaactcagtaccgttgaattgagccggctgtccgccaccttgaacaatccgggacttacggaggaaagcaagcgtatgcgagtggcaggaatggtcaatgccattgtgttgtcacaacaggcatcccagaacttcgagcagggaatgtcagagcaacagggccagaacgagcaaatcagaagataatgaaaagcgtgatgatggaaataggattgttgtttgtcggactgtcccttgcaggactgcatacccttgtatgctaccggctgttcggtctggtggtgacactcgtgattgtgggtgtgcaggttgtcattgcgtcagggatagtctggattaaaatccgtgcgcccgattaaagacggaacgtatatgcgggtagttcacatttaataggatattccggtcaaatggtcttggttaaaataaaactacaagcaatatgattaagtgtaacgtaacagtgtgcggaaccatcagcaaggcggctgtagtgcgcaccaacaatgagaacaaggctttcacggcatttgccgtaaattgcgtgattccagcaagaaacggtatcgacaaaacagtggaaatctctgtcgccaaggatggagaggagtacaatcgggctgactataccgtaggcaagagagtggaaatttccggtgtgttgactttcaagaagcgtggagacaacctctatttcaatctgtcggcttcatcggttaaccttaccgtggcttcaaacgaggattccatcaagggcgaaatgctcttccgtggaaagacaggcaagaacatcgaagagaagacagacaagaaaggcaagaatttcttgcagttctccgcattttctgcggaaaaggtcaatgacggcttcgagtacctgtgggtacgcttcttaggctttgaccgtaaacgtgaggagtggctgcaaccgcagaccggcatcgaggccaaaggtgaactggaactgtccgtctataacgacaagctgaacattacctgcaaggtatcggaaatgtcggaatatgtgaaacagccgtataaccctaacaactgacagccatggccggttacaggaaaaacagcaatgacggcccgtccgcggaggacaaggctcttgacctctttgcggaaatgatgatcgagcgtatcgagaccatcagcaaggactggacgaaaccgtggattaccgagggtagcctggggtggccgaagaatctgtccggacgtgagtataatgggatgaacgcgctgatgttgcttcttcattgcgagaacgagggctacaagataccgcgtttctgcacctttgactgcgtgcaacggatgaacaaaccgtccgaaaagcaggcaaaggagggcgtggaactgccgagggtgtcagtgaacaagggcgaaaaatccttccccgtgatgctcactacctttacctgcatccacaaggagaccaaggagaagatcaagtatgacgattttaagaaactctccgatgaagagaagaagatgtacaatgtatatccgaagatgcaggtcttccgggtattcaatgtagcccaaaccaatcttcaggaagcccgtccggaactttggagcaagttggcgaatggggatgccgtaaagttggatgaaagcgagaagatgtcttttgaaccgatggatgtgatgatccgtgataaccgctggatttgcccgataaagccgatgcaccaggacaaggcatacttttccatttccaagaacgagattgtggttcccgaaaaatcccagttcaaggacggcgaatcctattatggtactctttggcatgagatgacccacagtacgggcatcgaggggcaactcgaccgtatcaaaccgtccggtttcggttcggacgaatacgcacgtgaggaactggtggcagaattaggcagcgcattggtggcacagcgttacggcatgagcaaggcattgaaagaagagagctgcgcttatctgaaatcctggctggaccacttgaaggaatcgccccagtttatcaagaccacacttctggatgtaaaaagggctacctcgctcgttacgcagaatgtggataaaatagtgcaggaactggaacagaaaagcaaggtgcagcatgataacggacagcggaatgagatcaaacagtccgtacccgaaggaaaggtgttctactcttccgtagcctatctgcaatccaccgatgacacctcacgactggatgcgcttcgggagaaaggcgattatgagggattactccggcttgccaaggagtattatgacggcaatggaatcaacgagcaatatacctttgtctctcctcgccagaacaagggtgatgatctgctgatagaagacaaggattttgccgtgatctataacaacagcgtgggaggaacttacgaggtgatgctgaaatactctgagcaggaaatccgtgaccatatcacacggtatggtgtccggctggcaagcagtgacataaaagaggttgccaaagacatggcggccgagcagttctctgcgatgacaaggcagcgtactcctgtccttgaaatgccaaacggagatattctccatatcgggtataacagggatgccgacacccttgatgtcggcacggcgaccaatgccgggattgccgtcagtcacagttttccatacgaccacgacaattcgctcgattccaatctccaatccgtcaatgaaaagctgaatgaaatggagcaatatcaaaaagaggaggtggaatacagtggcgggatgcaccgctgagtataaagtctgctatctgttctgttcagccgtagagagtcgccctctctgcggctgaattggtttagtcccactgataagtcctacttacacaaaaaagagagatttttcaccttaattagtcgcaaaatatcggcactattctgaattagtgccgaaaatttgttacctttgcagtcgaagaaaggaataataatcacatgagcaacgagacgacaacattcatacttgactatgctgaagttcatcatgactttagtttaggagatttgtttgcttatctacaagagaagacaggcatcaaaaagtcttctttgtcctggtatctgttcaagctcgtgaatgaaaatgtactggtcagaactgggcggggaacgtatgccaaagtgatgaaacaggtcttttcaccccaaccgatagaggaagtgaaggaggtttacggtttgttgcaatcggattttccgtttgcgaaattctgtgtttatcaaggggacatcatagcccctttgcaacatcacctttcatccaaccgcatcatctacgtggaaacggacagggactcggcagaaaccgttttcaattttctgaaagacaagaaccacaatgtttacctacgaccggacaaaaatatgatataccgatatgtggatatggacagccgtgtcattttcgtgaaaaaccttgtttcggaagctcccttgcaagaagtatccggcgtgcctatgcccacgttggaaaaactgttagtggatatattgagagatacggactttttctacctgcaaggcagtgagagtgaccgtatcatagaaaacgcctttaacctgtacacaatcaacaggaacaggcttttcaggtatgccgacaggcgtaaagtgaagaaagaattatcgtcgattttagaaaacttaaacatacaatgataaagaaagagtgttttacgacagaatggattgaacaggttgcatccgaactgcactacaatgacaagaacctcatagagaaagtaatccgtgccttatccctgcttgaaatgttggttaaagccgggtgtcctctcgtcttcaagggtggcacagcacttatgctcatccttgggaaatctgcccatcgtctgtcaatcgacattgatgtcatctgtcctcccggaaccaatatagaggactatctgaaatcgtttgccgattttggctttatcaatctggaactcgtagagcgcaagcaaagggacgatgcggacatacctaaaagccattccaagtttttctatcagatagcttaccggaacgacacggacgcccaatcctatatcctgctggatgtactgtacgaggacattcattatttccaaacccggcaaatagccattgattgcccgttcatacggctggagggagaaccattaatggtgactgttccgtccgcagaagatattttaggggataaactgacagctttcgctcccaacactaccggaataccttattacaagaacggcagatcttgttcgatggagatagccaagcaactttatgacgtggggcggttgtttgaaaatgtttcaggattgcagattaccgcagaggctttccgcaagattgcggtagtcgaactctcgtaccggtctttgggaacggatatcggacaggtcttcaatgacatccgtcaaacggcactctgtatctccacacggggtaaattcggagaaggtgatttcaacttgatacaagacggaatcatccgtgtaaagtcatttatgtacaaacaacggtatctgatagacaatgctattattgatgcggcacgggcggcttatttagccacgctgattgaaaagggagtcacagaagtggaacgctattcaaacaatccggttgacatcaaggatttggttattcgaccttcgctgaccaacaaactgaacaagttgaaaagcaatctaccggaagccttctattattgggcaaagacgagtgaactgttggaagtatgattttttgcaaacagcacgaaggctattccgcgcataattcacggtcaagatgcacgaaaggctggtatttgtaatcctgctcggtgttatcagtgtcctatggtatatcgttggatattggcggcggaaagccggagaaacggcgtttttagctgcgcaaaagaccgagaaggaggatgaacgtgaccgtttatgccgtttggcggtaagagccggtcatcgggatgcttgtcgtatgttctattgtttacatccggatttattcaaagaacagccaccactcaaaccattcaaattgcacggtacaagagtagtattctatgggcaatattatccatcccggtacaaaccgtttctcaacgatgatcagcaggcgttctgccattccatctatgagtttaaggagggaaaaatacacggcattgagtttttcaaatcttgcatgaacgccttacaaatggatgaccaccattttcatatcatgttcatgccttgtagcgatgagttcaaatatatccagcgattcaagcgtttgaactggtatgtctgtacccattgtccgaatctgacatcaggactatatgatgttgatgtgttcgagccacgtgaaagtttgcatgaagccaaaggttatgagaatcgaatacttgaacggaattaccgaatcacaggagatataaaagggaaagatgttattattgttgacgatgtactgactaccgggcaaagtatgaccgactacaaggaggagatagaacggtgcggtggcaaggtggtagctgccattttctatggcaagactatcactatgccgcatccgctgattgtcaaattggaggtgtggggtgactatattacccgcttttccaaatcaaattagtctctttctttgcggttggattgttgtagctatatagtcagtcaatatcatagcctatcacgtattcatcgttgataagcagatagtaatagccgttgccacaattccggtattctttgctgaagcctgccgacatatcgccattgtcccgtggctcacaccaaagcgttccgtcataaccgcaaaaatcaaagcgacaagtggaaaaactctctttgttcttcattgcctctctgaaacgctgcatagatgccgttccacaatatttttcgatagtggcaagcccgatacatttgccgtcaatgcgtgttcctgtcgtgatatggttctcgtaaagggatttatccaaatccgcatttgcgatgtcacgaagccaggcgtttgtatgtgtggcaagccgggcaagtttctgatatttcagaatgagtttcctgtccgtattcgcctcctgttcttgcgagggatagtatatctgctcgatgcttgaccaatctgtgaatgcataatcttttgtccttttgccgggcgcgataatgccaataacacccctgtcccgattaatgaacaagcgtctgcgttttcctgcaatcctcacatatagagacgaaggattggtttcgttgcgaagatagctctccgcaggatgaatagttgtcgttcccatatccgtatctatttttcaatatttattttaccagtccttaccagtgtaccattgcggtaaagcatgatttctccgggcttgaaacccatttctccgaaggctatgtatctgatataatcccggtacttctcgcctgaaatttttttgccgcacaagttgttgaaaaacataggtattgaaaacccatcctctcctgacaacactgttttgccgttttgtctgatttcgtctaacataccaatttccaattttcatcatcaatcgtaagtttgttcatttcccaatcatactccacttccggtgcattggtataggggaaattgatggtgtagccgatttgtccgtaggaacaatgaagcggtgttacacaaatttccctgccaaaataaaggctcggtgtgcagtattttcgccagttaaagcggtctgcaaggatgttcctgcaaagtcttctgtaatatgatttgtccgataaagtcatagttgtagccattagataaattcaacttcaagtgcttgtagcaactcgtatatcttttcttcgacttcttccatatccgctacaatatccttaatgtgataaggtgcgccattcttgccgtgcccgtcatcgccaatccataaataggcttcataatccgggtcaaagtcctcgtaatatcgcttcataccggcaataagcgtgtcgatgtcttcatcctgcatatcggcattgaaattgaagtcctgcccgtatttggtatagcgttgaaactcaaattgtatgcttgtcttgttttcgtcttcaacgcttatgctccagcctttttcttgggcaatgtccgttactttccgtatctgttcttgggtagtcatactctttgtttttgtggggagacctctccaatctccccactggttgatttaatccgttatctcaaaataatattcctgttcctcgtccgaccattcagcggtcattgcatccgcttccctccacagtttgtcatagagaatggctctttgattgtctcgctcgtgccactgccatatcttgtgattgaggacaaggcaaagttccgtccaatacttgtagttgtctttccattcggacttggctcgcctgtatgtgtcggctatggcattgttcccgaacttgtcggcaatggagaaatcctgccaaaaggtggttatcggctcataaccgttcaactctgttatgttccatcttgggatggcgatttgaagtgcttgcatattcattattgtttatggttttcgtaatactcttcgggcaaatgatagaggtcgttctctgccaaatggtctatggcttccgctgccagacggcacgcccattcgttacgctggtcatatcttcccttgtgccagttctccgccaactgctccataaagtagaacatcagtttggctttctcgtttaccaaatagcggtggtcgtctgccaatgccttgcccacctttcggggtgaagccattttgccgttcacatagtttgagaactcgtccgcaaatcgtttgtcattctccgataattgattgttgtactccatttctaatgaattttgatgttgaacattttttcttttccctttgcttgaagctgttaaacttcgccaccgggatatgttttatgtgcgttaaagactatggggtaagggagataagacaagtaaataaacagggagttaatgaaataccactaatggcacattcgtggaaagctgtcgttaagtccactgaattgttagcgcaggcggtacttggcattctacctccatagtacctttgcacgataaaacaatgccgtgtggcgtgatggccggctctaaggagaatcctccgatgactataatgggagattatcctataaaggttttaggatataaattcggcaatagtttttatttgttgccgacattatacaaaaggatatatatgcagtacattataacggtcaagtgtatgagcagtagcggattttatgcacttactgttcggttaggcacaaagatagctaaaaggaagaaactttgagtttggcactttccccgctattgcttatacaccttgttgtgcattcggctttctttttttactaatttatcagataaagttaatatctttgcagtcaagcaatttcaatttttgaattatgtatttcagcagaccttggacttctatctaagtgataggcagtcctgaataaattccaatcaatcttttaggtcaagacaatcagtctatgctttgtgtgtgctgtcttttttttgatagcattgctttgtcgtagttgctctgtcgggtaatactgcctattcacttctccacgatttgaattcaagtattcacctgtaagaagtaattaacgtgagttcgatgaattataactaaaagagtgacagctgaataagtccgttttcttctgattcaaccctctctactgcaatcatcggcttctttgggaagaatgagtatgccgcaagcccggccataaggttgacagtgaatccggtaacggatcggtgacgcgaatgttcaatctgggctatgttcttaagttcgtcattgatggtctcgatgatggcccttttacggagaagtatcttgtcactaagcgtcattatctgtcccttcatattatttctcagttttgtaataagctgaataccatcgacaaacaactttgagaagatgtccttggatatgtaccctttgtcgccggccaactttccaaacaactgttcaacgaaagtcttgttctttaaagcttaacagttcccccatctcattgcatatcagatgaagtttgaagccatagaaccatcccatcgaacacagcccccgttgagctatacctttaaagaccttgtgcatatgaatacgttggttcctgcatacgcgaagcaatgtgctgtcgacaaagctgatcccggtgcatttccccatacagcatctcttcacaaagagaatgaacgggattacaactgtcctttcaagttcagtaaatcgattgtatgccactgtctttggaaacatgtcagtcatatgttctttaacttcattgatatagaaatgcttgaaacatttatatccgctcaggtggaacaaaatcattatggttatgatctccgcagaggacattctcgagtcgcgatgatacttgcgtttggacttgtctcgcttaggtgcaagaccgtttgccttgatgaatcggtcataaagtttgcaaaagtcatcggccatacagaaaatttcagtaattttgtctcttgagatcatagcaatgtattttgtgaagttgatttgtagtgatttcaaatttacaaaatatattgctattttactaataatcaacaacttaatttcaccgaactgacgttaattaatgacaaaaaagaaattgcccgttcgtttcacgggtcagcactttactattgacaaagtgctaataaaagatgcaataaaacaagcaaatataactcaacaagatacagttttggatattggtgcgggcaaaggttttattactgtccacctgctgaaaaatgtgaacaaagttgttgccattgaaaacgacttggtcttatacaagcatttgtgtaagaggtttaataatgcccaaaacgttcaggttgttgggtgtgattttagaaaatttacagttccgctgttaccttttaaggtagtgtcaaatattccttatggcattacttccgatattttcaggattttgatgtttgataatgtcgaactttttttgggaggttccattgtccttcagtcagagcctgcaaaaaagttggtttcaagtaaggtttataatccatatacggtgttttatcatactttttatgatttggagttcctgtacgagataagtcccggaagttttttgccaccgccaactgtcaagtcagctctgttaaaaattaaaagaaaacagtcgtctattgattttgaacttaaagtcaaatatttagcgtttatttcctgtcttttacagaaacctgatttatctgttagaacagccctaaagtcaattttcagaaaaagtcaggtcaggtcaatttcggaaaagttcggaataaaccttaatgcacaaattgtatgtttgtcgccaagtcaatggaaaaactgttttttggaaatgctggaagttgtccccgaaaaatttcatccgtcataacctaatcctatcttgttaaagttagattttctagttcggagttcgttcttcaagctgatgcacaacagttagcatttaagtcttgtataacagaaatcactacggtaaacagcaagttaccgtagccacgcataaagccacctgctacaatgtgtgtcgtaacaagtggctgacgaaaagaacagaacagattatgcggtcattcgcttacggatttgccgggcgttcttctgaacaagccgaataattcggtcgtggtattccgtagccttattgcaaagccctcttgactgcaataccttgaatgtttcaaggctcaattcaatggtttcaatacgctggttttcaattcggactgaaaataccaacgactgcggtttgagataatattcgcattgtccgacacaatgatgcagggcgttcccctccttgtaataatcatccacgctttccaacacgctgactacaatcagtccgtccgtgaatgacagtccgaagaatttgcttttcaattctttaaaacgctcctcgttctcctttgcctttttcctttgtttctcacgctcctcccgttcttgaataatccttgcccgttcctgatagcggtcgtgttcagctttcaagtctaatggacagacatagtgggcattgtgaatatccttgccacacctttcaagtaagcggatgtaatctgtccaaagagaaatatctgctatatgatagccattgcgtaaaactatcttgtaagtgttccaatacaaatcaaagtacattgaatgttgcaggaagtagttcaaatcggttttcctgcctgccttgaacatcgtttcggctctgctgtctgtcaacaaggcttcgataagccgtgtcggttcgatgtcagccaatgagccttgcaatccgttgcgtcttaactttggagtggcagaataatatggatagaccttgcaatcggcaatccgtctatacacatagttgtctctccgtaactccagacagccgtccaaaacaaaagtgtccgcataatgtccgagtgtgcgtttcaatgccgttatctccgtcttgccgttatcgtccacccaatagcgtgcaatctccatagaataatactccgctttcttgcctttacggaagtttgcgttcataagaaatacacgctgtacctgtaaaccgtcctgtgtggcaagcgtggaataatacgctttgtccttgaatgtcctgcacttggtgtccagtatctccagtcttgcaccgcaatgtgggcaacggcacacctttttgttactctcgttccattgataaccgcaatccatacaggtcgttcctccgttttttgtgcggtatgcgtaatggctgatacattgacgaaatgcccataactcctgcttctttgtctgtggcagtaaccgtccgttggcggttactaccttatgctgtaatctcgttttcgctctcatagtcctaaatcaaataatgttggttgttcgggttcttgtctgaccgctttcggggtcggtttcggtttgctgtttcgctgttggattttacgcagttcctcgttttggtaggctttgagtgcattctccctcgcttcggcttgttcttcgggagatagttctactctatggttgactatcactccgcagttgaccgccttacccacttctatatcatcttcatcatagtaatgtactccaagcgaataaacctcgtcatcggtcataccgcaaccgccctctttacagattgccattgcctggttgagtatgaatgtcacgcaatcgtccaaattcttgttctctttggcatacgacactgcaaagagttcatcggtcttggctctttcgtccagatatgccttaattgcctgcttgaaatgttctgttcctttcataatgtctgttattttgcttgataatagatacttggttcacttgaaacattgtatatgtacgctccgcaccttaccaaaagtgcttggtttccgtagtacatccgtttcattcctttgatactgcctgtgtggtggaaattgggaaatcggctgatattgcaccgctgtccttgttcctttgtcattcgtcttgtcctcatagtgtttagaaatgatagtcaataactccaccgatgtaaagtagttttcccggctcaaactggctgaccgtctgtaaaaacgagtacgattgttcggcatagccattaacgccatactcgtccatatagaactgataaccgaggtcaagtggatttttgagaaatttttcaagctggtacaccgctccaatccacatcatgcagttttcaacggtaacggcttgtgccttttcttggatggctgtaacaaattcctttttccacttgtccgcaccgccattgtatcggattgtgttttctgccacaagagtgaacatcccttttggcaatgccttttctatcagattggcaatatggaatttgcgttcttcctcgtctatctccgaacaatagtcgtaatagtgtccgtccccttgttcaagggtgtcctcgttcaagtagttgtccctgtcaactcttgtttccgtgatttgaaaaatcttgctgtgcataatcagtctgttttaatcgttgaacttttgtctttttcttttcccttattttgaagtctttatcggctttcttgtcgggatctgaattttacgtgcaaccaagagactgtggaaacagagggataagacaagtaaatggctgaggagttgatgaaatacccaatttacgcctgccggaaattgcggaaagctgtcgtcaaatccataaggcattagtggagccgatcggtggaacggtacttggcgttccctcgccgcagtacctttgcagaggaaaatagagctgacaagatgagccggggaaagttcataattctcaataaatataaaagtcaaaggcacactattaaaaaggtaacgacaattatcttccggataaaaaaggatattaggttccatttaggttatacttaaacggactataaaaggcattgccatcaaagaaggaaacgatgataacggactgaagccaaataccagctcagtccgttaatacatcaattttattcttcctctgccattgcttttccgtatgcaataatttcatccattgtaagccattgaggtttttcgtcttccttgaaactattataaagttcagccatcagtttaatttgcagatttacattgcctgcccacaagcgtttgatattccgattgccgtaattaaggtagtattcgcaatcagcttgtaaacgacctaataattggtacctgaataccatatcacgatgtaaaactctgtctattatctttctctcatctgaatttgtttccatatttaccataatcttttttattttgattttttcttctcccttattttgaagcttttatcggctttcttgtcggaatctgaattttacgtgcaaccaagagactgtggaaacagaaggataagacaagtaaatggctgaggagttgatgaaatacccaattaacacttggtggaaattgaggaaagttgtcgtcaagtccaccaagccattagcggaacgacctgcatagcggtacttggcattccctcaccgcagtacctttgcaaaggaaaatagagccagcaagatgagccggaggtgttcattatatgtgacaagtaaaactgctataattggcagatagatagtaggaattgtaaaacaggaaaagcataacaactccggcaaattctttcgatatttgacgaagttgttatatagttcatgcttttttcttattaaaagcataacaaaatcggcaagacgcattgatatttgccaaatttgttataacttcgcaacataattgaagaacaataatgactgccgtaaatcagataatagatattgccagaaaacaggacgggcaattcacacgaaaagacctgctgaatgcggtgcgctctggtatgaaaaacatatcagaaggttctcttgttgtgcttttgaataggatgcttgcagagaacaaaatcatcagagtttcatacgggaaatacaaattaaatgaagatttgaaatatgattttttgtatgagccaagcgaatttatgctttcactcaacagacatataaaagaaaaattccctttcatagattattgtatatggcaaccatctatattcgcttctatgatgttacatatacctgcggtaagaactacattggtagatgttgaaagggtggcaatggaatccgttttcatgtcattacaaaacatggaatctgcaatccctgtttttttgaatccgaaccaagaagatgcggatcgatatattacaaatcgtgatatgattattgttcgtcctcttgtcaaagaggctccaatagatattattgatggctgtcccgttcctacattggagaaaatgcttgttgatgccatatccgacaaggaactacaacatcttcagggtaatgaattatatactatatattcaaacgccttctcggactatgaaatcaaaatgccacggctgttgagatatgcggcacgccgtaacagaaaacaaaaagtcgaacaaattatcaatacaatcaatatatgatacatcccgatagcaggacattatcttggatagaacaagtagccaaagacaacaagataaaagatatagccctcgttgaaaaaacaatccgtgcattctcgttgttggaagcattagcccggtccggttgtccctttttattcaagggaggatcttccttaatgcttcatcttgataccggcaaacgactttcaatcgacattgatataatttgtcctccaggaacaaggattgaagattatctggaaaagtattccgaagaatatggttttggagaggttaaattggtggaacgtatctctcgtaccgatataccaaaacaacatgccaaattcttttaccaggtggcatatccggcaggaggacgtcaggacaagattctgttggatgtattattcgaggaaattcattatgcaaatgtggtggaacttcccattaaaagtcgtttgttaaagacagaaggagatcccgtaatggtaaaattgccaagtaaagaagatctgctcggtgataaattaaccgcgtttgctcctcacacgaccggaatcccatttttcaaaggagaaaagaattgttcaatggaaatctgtaaacagttatttgacgttgcatcgcttttcgacatagttggtgacttatctgttacagcggaaacattcaataagtttgcgatggttgaacttcaatacagaggtgagaatcctgatgcaattcaaaaagttttggatgacatttatgatacagccaaatgtatagtaatgcgcgggcaggacaatcaggaggaatttgacctgattcaagatggaattaaaaaagtgcgtggctttattcatagtgaagtctatactttggaaagtgctattacaaatgcttcaaaggcagcttatcttgccaaacttatcagtaatggcataaatgagataaagcactataatccatccgaagcaaatctattggtcaacgtaacgatacactctccactctcaaccaaattgaataaattaaagaagacgaatgcagaagcgttcttctattggagcgaaatacaaaagttattataacgagatttttataatgcagaagagccgatccatcacggacaggctctcctttcaaaagaattgacatttaactaatcaatttgaacaaaaagaatcttacactttcctatttcatatatagcatgactttggtatgtctgttagcttcagtgggtacataattggaaatacctccttgacagacctttgttatattttcaacagtcactccgcgcctgcgcaactccgtggcaatataatcggctctcgatgcgctcaacttattgtttatatcggcagttccggtggcagcgtcagccgcacctgcaacagtcacggataatccgtatttctttgtcacacgcgccagttcatccagattgaccaactgggatttatcagtcagttgagccgtgccgagttcaaagaagaaatagacaggtgaaccgatgcactcgttgccggaacctataaaggagagataatccgaatggctataaatggaaatgctgtcattattcatatctggagacagcagggaatcggcacctgtgacatagaagccgtttacaacgctaccgtcattattgggtatggcattgacaaattcagacttactgaacaaactgtcattggacaatggagacttaccatcccaatgcctgtttttcaatcttgctcggagcgagttcagtccgctgtaatcgtttctcggatagacattgcccaaactctcccggtcatcaaacatcttgctatatttatcaagcaagccctcaatttccagaatcttcttcaattcgttgatcgttctcatcgccctgtcatgttgcccggtgtatctgcgattactctccgatagctgtgaagcgtaaccaatcagccactcgttctgccggatgtaaggactcgcatcaacggcacgtttccagccggtctttccaatcgtaaacgacaagccggctgacacggagagcatattatctccgaaacgattggatttgccatagccatcaaagtcctggaatgtggaaacattgccaatttccaacaatgcagacagccgtttacagatacggtattgtccctgtattccgtatgaaatggcaaacggattatgtccgttctgcggattgtgcatcagtccaaatcctatgtatggaatgattccccaacgaggattctcaaccttgccataccgatatccaagcacattccacatcaagtcagcatgaaagtgatggtagtcatttgtgaccagttcgcaatctttgaactgccaacctccataaccgattcttgctccgatctgcggagtgaaccacttgccaagcgatgcgaaaatagtaggctttatcctgtcaaataagtcggcacaaccaacaggtttgccaatgaacgcacttgcaccaccttgaagactgacaaaccagttgccgttccaaggcgatgtcacgaatacacccttatggtaagtcggatccaaaggccggagcatctgttcgatatccgtgtacgactccagctgtacagtgtcctttgtcacaggtggtacagccgctttcatgtgcagtgaacagcccatacctgccactgccagaattaaaaatattttctttgtcatattcaacgcattattttgttttgttatccattgcagaaaaacatattctgccgattacctcttttgcttcttgccggaagccggtcgcatcattctgcttgccatcatcatgcaacgccttgcccacgcacggttatcctcgtcatcatcctttccccatttaaggttgcttttacttcctccaccgccatgcgtttcggcaaatgtagtggcatcgttgaccataccaaggaagaggagcgtggcgcagtgcatcacttccgccccttgctcggtcaggctctgcaacaaagaaccgtcaaagacggattgctccgcagctcccatttcagccactcttgccgaatgctctccaaccaatgtttccagcatcacatctttgagcagtacatccacgttggaatggatttcacgactgtatttataggcttcgcctttcagttcctccgtgcgctcgccaatggcatccatgtcccttttaagggcttcaagctgttggtcagccgtccgtagcttatcctgcttgtcttccaatttcgtttggatagaagccagttctttttccaaccgttccctctcggctataatggtagccgtatctccctgatgggattgaagggtgcgttccaatgccgatagttgggattccttttccgctttcgcttttcggaggttatccaccatagaggtcaagcctttcaccctgcgctctgccagacttatttccactttaaggtctgccaatgcttttttgtgttggacaacctgttcctctatattggtacattcttccgaaaggtatcggcggtattcctccgtgcttcgatgtcttgccccagtttcggaaacattacgtccccgttccagttgccatttttcgttcacttgcgagagttcatcgtgtaacattttcattcttgcagaaaactcatatttgtcctttcctgcaaacatctttttgaacgcaaacttaccgtcttggattggcaataaggtaaggtgcatatgcggggtcgtttcatcaagatgtacataacacccgacaatattctcctcaccgaatctttcactcatgaatcggtacatatcctttgcccattcttctatttccggctttcgttgaagcgaagcattggcggtattgttaccggaaccatacacaacagcctggtctccaaaagcaagctgccgcatttgaaacttcgatccgcccagtataaaatccacgaccgtgcgaaatttcggttctgccaaatccgaattgggatcttttatcccacgcccggcaaggttttcagccatgcgttcaggaatagacttgtccttgtttataggtcgcaccttaccgccctttacaatctcgaaattcaaccgttccctttggcggtcataagttcccttgtctatggcgtgtttccagccgctttccgtccagttacgctggtgttcgttgctttgcgcggtggttatgcctttcatcacgttcatgtgcatcacctgccatgatttttcagccatatcatccgtttttatcggacaaccgatttgccccagcttgctgcttgtccggcaaccactcccaccgaccgtagtcgtgtggggtattgagttacccatacttccctctgtttggtcaacgtgcaagcaccgctgcacgcttaaaatggcaagcctacaaatgtagggcatcacggttcatccgtggttatacaatagtttttgacttacaacatcggttgtggagtctataaaagggtggaatcacgctcctggtactttgcccacaacgccctgaacggctgtcggagcgtggcaagcatatccgtttcgctcgaactattgggcgcgccgtcgtttccagcgtccagaatcatcttggcgattatcttggatgcctccaaaagtgaagtccagtcacctcccagttccccgtgaaaaaactccaagaaatcggtcggatcatcgaagcgcgaatttcgtatggcgcgtttcagtccggctacggctacacgttcgacaatctcttgggctaactccgtttctgcacctgcctttattgccggcttgtcgcccgaatgatctttgccggattcatcggcaagccgtttcagtccggcttcatgatactgtccacaaatctctcccatatcttcgtcagacagactgccatttatccattcggacaaagccttgtccaaatcatcggcaagtccggcccctgtatgaccggtataagaggcaggagtttcgccactggagaatggcgcaaaagtcacggtaatgaccacactctttgcgaaccttgtccgacgaatatatcccatctcctccagtttgtcaaggaacgccctgacggtagccctgtgccagtgccattccaccgcaaggtctgaaatggtcacatgacactggtcagcctgcaacacatactcgtggttcttcaaaaagggagcgataaaacctgccgttgctttctccaacaggtcgtagtaggcaccggtctttgtcttccgttcaccgactttctctttgaggtagtcgaaaaacatcatatctgccaatacctgattggcggctctattcttgtctttcatcatttcatttgatttttatttgactatatgtggattctattaacctgccactatccacttattcgtggcaggttcgcgtgatgatgtcagcagtaatgttcggacattgtttttggattttctttcaaatgcttgcgcgtgtcgtcatccttccattcggctaacacacggcaagagggatagaacatggcagccaaaagaagaaaggcgagtgtgaacgccgtggtgtgcagatgtggtacagcgcagatgaccaatgtgatgaaggctgccataacgaacctttttttatcctcgtggagtctgtgcatccacctgtcggcacgtctgaacgagaacagaacggcacaaggtatggtggatatcagaactccccactctccgaagtgtctgccggcatagacatagtgatatagcaggaggaagataagcatacactgcacatagagtttccttgcactctcactacccgccatcctaaggtaaaactttgccataaaaagccggttgctcctgtacaatgacatgggcagtataatgagcaatgccggaaatgacatttcgatgataatccaaatcataatcgtaatcctttgtgtaatcagtattgtttgaataatggcagttcggtcagttccagtttgaccagcccataggtggcaatctctataatggcttccacatccttggcttcaagatatgacgctccttttttaagccgtgcctttaactcgtgattcttttgacgataccttgccaatgccttgtccagctcgtattcggatatgctccatttcgtgccacgctcatagccattgtgcttataagtggaacggagccggagcatacggcacacgcaggaaaccggcctgccccgtctgaacacgacactttgcctgtatccatatccgtcatccacgactatccaactcctgtacatattgataatgtatagcatttgcaggtatatcgtccgtctcatataaattcggcaagcaactcctccttggtcttgcggtacttgaaatgaccggtcttttcgtgaagtttcaagtcaaggcagatgtcagaacacatgaactccagggattcatagatggtcacgtcaatgcggtcaaccttgccggtatcagaaactctcgcgttcatcttgaacatctgtccgaaagccggattggaataggcacaggtgctgctgccgaatgtcgttgcgcttgaaggaatatgatgataaagggttatcagctccatgtcgtcctcgaagatgtccattacttcttccagatcgtatgggtcggcaagcggaaacgaaaggaggacgtaatcgtcatagaaccgcggctgttccattgtggttacatccagcaactgcggaagctggagcggcacaaaggagagaaagtcatcgtaaaaaagttgtagcataactgttgtatttatttgtttctggttcgtcaaatggatgtgagcattatcttgatcagtactccgggcaatacccgccattggtcgttgtccgttccggcagtcttgttgagtttggctatcatctgaggtgtccggtcagcgactgcatgaagtgttgtcctttccatatcggacaggatagccacgctgaaaccatccaaggcaacatacggctgcaacaacatccaaacgtaagcccttgcctgcgcttcggtctttacattgtcttggttgatgtcatcacggcaagccaaagcgttgagtatgattctccggttggttcgcctggctgtatataccaaggcatcccggtaagagagcctgccattctccgcagactggaatatcgacaggcagcatttctccgtgtcgcacgtaatgacagaaaggtcggcatcggcaagttcagtcaaatggtcaaggaacgaacggaacagcctgtcctcttcctttatgaaagcaagcatttcactcttgccgcttattccggatttcaaggtcttggaaaggaacattcggtatttttcaacgacagcattggcactgcctttatatgtcgggacggaatccaatggtttgaaaaacggctccgcttccgctgccgactgcatcagctccgtgtcttgccggtattgggaagtctgctctctgaggagcaacacatccgcaaaagttctcggcttctccagagccagacgggtaaattcaatgcgcaacgaatcgtgcaatccacgaatttcgctttcgtaattggcgtgaatacggtttgccgtgtctttggcgacacaggcagataccgaatctcgaagcgactgccagtcgttgactttttcaatcagacggtctgttggcaggtttgcttcctttcgcacctcggacaggtatgacctgtaagcatcggcagcatttttaacggtctgaaacatactgttgccggtcttttctccgcatgatgccaatgtgacaatggcaaaacatacggcaaaagatttggcatacgaagcacatttctttgagtatgatttcaagtttcctctcttcggtttttgcattgattctactttaaacaagcctttatacatgatatttttattggtttatggcggcaaagttaagtataaaagtttgtatgataatactctaaaataaaactttaatctattttctttttcatacttacgagtataatccgcgaaataaacaagagcgtaacaagtgaaaatacaaagtataataattgaaaaatattttattgagtatgattttaaccgaattaaactttgtatctttgcacttggtatcatttagcattgaacagcactatggcaaaagtaggttacatattcaaggcagccggttatgacggcttcgacactgacaagaagtggatggagcaatacggctgtgtacaagtgatagaggaagagaacggacacgagaaactgcgccctcaatggaaacaactgatggcaagtctggagcgtggggacgagctggttgtctcaaaattcagcaatgccctgcgtggctcccgtgagctggcgacattcatcgagttctgccgggtaaaggtggttcggattgtctccattcacgacaagattgacagccgtggggatttgtttccggaaaccaaagcctccgatgtactggagatgttcggttctttgccggaggaatgtgccatgctgcgcaaggcttcagcccacatcatccatctgaaacagaatatcaaccagccgaccaaagagaaaaacatcagcagggcggaacgtgaaaaaactatcgtggcgatgtacaataacgggcattccattgatgacatctggaaagtgagtggattcaacagccgcagttcggtgttccgcattcttaataaatacggtgtttcactcaatcgaggcaagttcagcgggccgcttgggaaaagaaagaataaagaaaactaattatgggacatagtaaaatttacaataacgactcaaaatatgttatcgccaacgtcatggacgatgtagaaaacgttaatgtgagagaatatttaattgattttcatgcaaaatcaatctatccggcaatagaagcaatggttctaaaagaacagaatttagacacgatatgcaaagatccaatagcaataatgttggcatcaaaaaaaatagctgaaaaagaaattgctagagctacttctctcgaaattcccgaaaatattaaattgctatttcaagaagaactatccaaaaaagaacaaatttctctattaaggggtatttcaataaaaccagaacaactcgctacaatctttttatatgccaatgataaagggtacaaattcagcaattacagatttgaagatacaccaaaaaaatatataggtgcagatttaccatcatttatttatctatgcgatgaaaataccattgaacactatggagagacatcattaacagatggtcaaatgaaagaaataataactgtttcacaatttgttttagcacgaatccttaacaatgggaaacattggcattgcttttatcaaaccagaagggggttattaggcaatgaaccaggagaatatggaaacaaatcgcacattcactatatatctgactcgtttagcatctcattaaaagatgtgattaagggatttaaagctggaatttgcccacattctaaagttcacataacacttgatgaatcaaaagaataaagtttattgtgtaactattgtaacaatcaaattcgtttttaaataatgaatagcaaaccacacatatggtctattgacaagttattagggaagaatctaatcattccagattatcaacggccatataaatggacggacaaaaacataacagaactcattctcgatactcaaaaaagtattgaagaaagccgtaagtacgctaatttcaaatatcgtataggtacagtaattcttcatagaaatgaaaacaatgagtatgagattgttgacggacagcagcgcatactatcattccttttattgaaattacatttagattctgattttacgtgtaatctgctaaagaacaagtttctaaataaaattacacagaagaatctacatgacaactatacaactatccgagagtggttttcttctgttgatgatacagtgaaggccatttttaacgatgccctaaaaaacattctagaagttgtcgtgattacagtaaatagaatagatgaagcattccaattattcgattctcaaaacacacgtggtcgtgcgctatatccgcatgatttacttaaagcttatcatcttagagagattcacgataagtatgagatgcagaatgccgtagtgaaatgggaatcgaaagatccaaaggctatcagagagttattcgacttgtaccttttcccgatatggaattgggcaaaatgtcgaaagtgtggtaatttcacttctgctgatatagacatctataaaggtattgaagagaagtatggttacacttacgcgcgcagagccaacaaagccatgccttatttcctactcacagagccattcatttcaggaagtgacttttttgaaatggttgatcactatatgaagatgttgcataatataaaagaagaaattgtaacgaatccagcatttcatgatatcgaactgattattacaaacggaaaagatgtggattcagcagaagaattagataaatctttcaaatcgtcatcagttggacttaaccatgcacgaaacctctttttctgcgccttgctttgctattacgaccgttttcacaactttgatgtcatggccgtgaaaaaactatttacttgggctatgatgattagaattgatatgcagcatttaggctttgatactattaatagatatgccataggtatagaagatgacaaatacagcaatgtaaaacccgtaatatccatgattgcttatgcgcgtagacatactgaaatctcaggaatgagacttgacatgagaaatgatgacaaagcagccagtgaaaattggaacaatttatatgcacaacttcgtcaacttaatggatacaattaatatggtagaagaattaaaaatattggatgaagtaacaatattcgatacaaatactcactatgtaattccgcgctatcagcgagcctatgcgtgggaagacaaagagatagcgcaattaattgatgatattaacgatattgattcatccgagaactattacatcggttcacttgttgtttccaaggtacaagataaacctaaaacgtatgaagttgttgatggacagcaacgtcttacaacactttttcttttattgcaataccttgtatcagaaggagcattggaaggagaattaggacagactctctcttttgattgtcgctctaaatctaaatataccctttctaatatccaacaaatactagcagacaaaaagccttctgccgattatgaggaaaatatagatcagtctatccttaatggtataaaagcaatccgtcaaaagtttacgagtgacaaaggattaaacaaggatgaatttgtttcccgtttgcaacatgtgattctctataagatagaagtgcctgaacatacagacttaaaccgttacttcgagataatgaacacccgtggagagcaattagaacagcatgatatccttaaagcccggctcatgagatttctcaacaatagaaaggaacaagaactattttcacggatatggaatgcttgtagcgatatgacaggctatgttcaaatgcacttctcacgaacagaaagagaaaacattttcggtggagagtggaatggctggcctgctaatgaatggagtgaatatagtgactgtttagaaattacagaggattcggagaataatgcaaccataaacgaaatcattaagccaagattcaaagttgacaatgtagatggcatacttgacgatgatactcatatacgctttgaaagcatcattgaattcccgtacttcttgcttcatgcactcagggtttttgtggatttctacgatgtgtcattggaaaaagatttgggcgaattacttgatgacaagaaattgattgctgactttgaaaacgtgattaaatatggaacattagataatgaacctatcaagaacaacaaagaaaattttgccagaatgataattattcatctgttgcaaacacgttatctttttgatagtttcatcataaagagagaatatactggcgaagacaaagagggcgaatggagtcttaaggaattgcacacatctggacaggcatctaaaaagaaagcatattattcaaatacaaagttgaagtatgaaaaagaatgggaaacgacatatgctccacgcaataaagaatgtttaatgattcagtctgcgcttcgagtatcgtatacatccccaaaagtcatgcactggataaccgagcttgttctatggctgtttgagaatgatgaagtagccctattaacaaacgaggctgaagacatagcggcactggcaaccaaggagaatttcttggatggaaaggactacaaacttggtgtaacgactcctcacatcgtgttcaactttctggattacttgttatggaagaataataaaagcaaatacagcgattttgaattcgaattccgtaactctgttgaacactggtatccacaaaatccatctgacggttcttttgactcatgggatgacaaagatacatttggaaatctgtgtatcatttctcgaagtgtcaattcaaagttttcaaacctttcaccagagtcaaagatgaagtcatatggcaaaatggttcaaaaaggaagtttgaaacttcgcattatgggagatattatagaaaaaagttcaaatgacaaatggattaaggttcaatgtcatgaacacggggctgagatgattgacatattagaaacagcatgcagaacattagattgatttactgaatatgagcaagtgtaattacatacaagccgacattatagaaactgagcgattgctcgtccgcaaacttaccaatgatgattttgatactttgcttacaataatgggtaagccggaagtgatgtacgcttgggagcatggcttcagcgaagatgatgtacaagactggatagaaagacagctcgtccgatatgccaaagatggtatcggatattttgccgttctacagaaagaaagcggacaactgataggccaggccggacttatgaaaacaacaatgaacgggaatgaagtcgttgagatcggctacatatttgacaacacatattggcacaacggttacgcgacagaagccgccgaatctctcatagcctatgcttttgacagcttggaattaccggctgtatattgtagtatccgcccggaaaacaaggcttccattcgagtggcaaaacggcttggtatggaatcttgtagtagccatattgttgtttaccgaggtaaagaaatgccccatatcatatacaaattaaaaaagccgaaataaaatgagcaaaaaagaatacatacaagccaataaggaatggctggaagcgaaagccaaagaagagggagtaaagccactcccgaaaggtatctattacaaggtcatcagtaagggaaagaacgatggcaagcaccctgcaccacgcagtatcgtcacagcccactataccgggtggaccataaacggaaagaaatttgacagcagtcggggtggcactccgattgcattccgcctgaacgaactgattgagggttggattatcgcaatgcaacagatgtgtatcggggacaaatgggagatttatatccctgccgaaatgggatatggcaagttctcgcaacccggcatacccggtggctcaacactcatcttcgagatagaacttttcggaattgcataggccaagaacagatgacatcctctcaaaaaaaaatgcttcatcatattgatatttaacaccatacattcgtttatgtcgcgtttttttcgtatctttacaagtagtaatcagaaataaatcagtgatatgggagacgtaatcattacagtattgggattgtgggtgttcatcaaaatcgtgaaagtgatattcggaggctggagcaaaagcgactaccagcgggacaggtaagattcaaccaacagaatgcagcctatgacagtcgttcatgtctggcatagcgagggacttaaaaatcagtatttaattctccctcttgtcgaaaatatcaacccaagcaaagggcgggcagtaaacgagtttcttctgcaagcccgataaataacaaaatgttttgcctaccgggagaaaacgaagtcttggagcggttggcaaatctttttgtatcgggcgatttcggcagagtgtcttgcgaaagaggagcaacgtgcaacattgcgcagccgagcaagtctctcgaagaaaaatagaagaagccgttgacgggatgggtgaaaacttataatgggcaacccatagatgtatgacaagtaaacatacgagcaaaaacaaaagcgaccgaagccgctttgtttgtcggaacgaggcaggagttatttcttgccttttttcgttttcttttccggctccgcaggagtttcttccttgtcgggtgtctggtagaacttgttagcgaccatgacgatgcggttgtgtttcacgccgtccttgtcaatccattcttcgggtttgaagtagccctccactgtaagcagggtacccttggtgatttgggcaagcgaatcggtgttggcgttgttgcgccaggcttccacgttgatgaaagcggacacacgttttgtttcctcgccactcttctcctgacggcttactgccaatgagaagcgtgccacgcttgcatttgcgaactgacggatttctgcgtccttacctacgaatcctgatactgcgaaattgttctcaatctgtttcatgttacaatgctttaagttgttaattaaattatttttacgctgccaatataagtgagtgcagttacagggttgcgacaaggttagcaatcaaatactctttatttttgtcagcgtaagccgtcaaaacctccggccagataaaggaagatttgtgaagcaacaccattgaccaaggctttcagccgtacccggctgcatactaactttgcaacggaaaaatgaggaataacacggccaaaagctgtaacgatatggattggtgaataaacaagtgagcaaggttcgcagacaaaggacagcatccgtccgcagacacaaagtttcaggtacgcttcggctgtaaatcccaaaggagcagagtgatgagacgaggaatccagtatgtcctctcaatgtggatgccgtaatactgaatccgttatgacgctgcacagccaaaggtattttgctatggaagggatagccgaagaacagaatggcacgaagatcgcggaagccagagaatagtcgcgttctaccttaccgacagaaccggagaaatcaaggcaaagaaaacaatggcaagaagtccggtgctcgttgaacaaagcagcccgatcgccattgcgaaatatgaaatgccatatatacaaaaggagacttgactgtcaaagatgaatatataagaggaaaaacggcttgccttgcaagctccaattataaaagttgatgccattggaaatgtatttccaaatggcgtggacacaacaatgtggagcattgccccacattgccattctgccagatgtcggtcagttcaggtatgaccattctgttatctccagttcctcgccacaagggaaatcaatgatagggtcacaaatgaatgtaccacagaaattgaccactacacagccgtttttcagagaggctggttcactccaatcatcgtccgtatgtcggatatgataccacagtttacccttgggcaaggtttcggtggcaatccgcaaatcaataaattcgccctcaatggtcttgccattcgccaaagtcagaagcataggcgatttgctttcttttctgtaatcgtacagcataatctttcttttaatctgttatctcaattatttcatcaatccgaccgcaaaggaatgtccgtaaagcggtcttgtccacagcatagtattcggctatatgtccgtattgcttgacaaagtagcgtttcagtacgtcagagaagtcaaagcggtagcccattagcggaatagcccttttgaaataggtgttgctgttcacgctgttcgtaagccaatttttctgttgtcggctcattggcgtaccctcattgagttgcactctcaattgatagaccttgctgtcttgcagggttgaaagttcgggaatatcccaatccacaaaccttgtcgctattggtgtcatcataaagcaatcctccattagtcatagattagcacttcatcccggtattccaccacctccttgccattggtgagccttaccactatctcgttgccgtagtctccaacgacttctccctctgtatgccccttgtaaggagtcagtaatgtgcataagcacccgataatgtccgtatcttgttcgtcctcgtaatacatagtcagtgagttttttaaggttatcggtatgaccattctccattagagaacacttggaagttcacatactcgttacatagttcgtgtgtcagcactcgaatgtagattttgtctttgtcctccaaaagagaaatcatcttgtttatctctttttcgggatagtcccattttgacgaaaactcgccctcgatactgtcttccgacctgtcaaggtaacagtcgcaaaatgtgtcttccaaaaagttctccaccttatcaaggtctttctcgttctccgtacttgcgtagaagatgttggtcgcataatttgccataatcgcttttgatttgattttttacttttccctctgttggcatcaactactttcgggtttgattaaaattatgtcgctttgcaaggtgtcccggctcttcctgcaaggcttcacagacaaaatacgacctcagttgaaaaccgagtgtggagattttggtttgaaccgataggcttgaccttgcaaggaagaaagacgggatatatacctttgcgacacaattcttatctgccaacccgaaagtgatgtgaagacgagaaaggatagtaggtgtgcaacaggagcactataaacggcaaaacgcatttcaagcaatagcgaataaaaaggaggatttgctgacgaaaagaaaaagcaatcaagagtttagaaattgagaaaatcaagcagtttagtttagaacttgattagatatacaaaaaccaaactaaacctattcaatcattactttactcacgttattggtaactgcatcaaacctaactttcgtccgagggacaagcgagggacaaacaacaatacaacgagggacaaattatgtcccttgcatttcagcatgctttttcgagaatggtcttattgcttttttcttttggtatgcaagactatggcttttggcgtttctgaaataatacagaatctaactctacatccgagggacgaggagaggcaaagcaaaataattgcgagggacaaaccgtgcctcttgcaattcaacacgtttttttgggaagtggttttattgtttttctttcttttggtatgcgaaattttgtcccccgtttgtcccccaaaaatattcttcaaaaatttacatattgatatacaatgctttatacaacacaaatatcgtttgcgtgggcaaataaacattctgcatcgggaagtaaatacttgattattaaatagttaaattgattataatcgattaatatggcgctctttacgggcgccttttttgttgctcaagtatcgttgataatcgttgctaagcctttttacgccattttttgtacctcctgtgtacctcaccacgaaaatccgaggattatcgttggcaaggtcgtggagaaagttgaatatggttgaatatggtttaagatggtggaataaaactggagaaatcaaggagaaataaaccctaaaaattcaagtaaaatggcaaagagcaacattagaattaaaaagatttgtgagtggtgtggccaagaattcgtagcacaaaaagtaactacgaaatactgctcacacagatgcgcgaatttggcttataaacaggccatacgagcaaaacggattcagcaggaagagcaaaggattcaaatcgttaagagtgaaaagcctttgatggatattaaagacaaagaatatttgtcgatcgctcaggctgctactttgttggggctttcactgcaagctgtttataaaatgatttatactggacatcttgctgcttataagttgagcagtaggctttcatttgttcggcagagcgatatagaagagatgcttaaaagaaacccatacaagaaacgacaacctaaagacactcttcctatcacagacttctataccaccaatgagattaaagagaaattcggtgtcaaagattcctggatatttcatatagctaaagagcataatataccccggacatttaaccgtgggaaaacctattggagcaaaaagcatattgatgactattttgcaaagaaagctcccgatcctgaaatcaaggaatggtacagcacgcaagatatgcaggagaagttcggcatgacactaacggccatttattcttttgtatcaaagaatgctattcctaaaaagaaagtcggcatcatggtgtactactccaaaaagcatgtggacattgccaaaggcctcattgccccagaagagcccaaatactacaccattgccgaagcgatggagcgattcaatctgacacgagaccaactctaccattatgtgaaataccataatattccccgtatcaaggtcggtaaatataccaagatcctgcgggcagagctggataagttctttgagcctccaaagatagaatgagccgaaagttatttttcggtgataaataccaccattagaacacctattttatttgcaacaaaaacaagtattcatcaaaaaacaatatagctatgacacttacatgtaccaacgtaactttgagacaaaagccattgcgtaacgaccgcatatctctttatctggattattatccggccatccgcaatccttacacgatgaagatgattcgccgggaattcctcggcatctacatctatgccaagcccaagaacgagcagcaaagaatgttcaatcaggatatgctgaacaaggcagaggcaatccgctgtatccgtgtccagtcgcttatcaatgaagaattcggattcctggacaagaacaagcaaaaggtagatttcctcgcctacttccggacaaaggcacgagaaaagtatgagaaatgggattgtgtttacaaccacttcgagaaatttgtcagtggcaaatgcacctttggcgatgtcaccgtggaactgtgcgagaagttcagggattacctgctcaaatgcaaacagatcaatcatcccaatgcttatatctcacgcaattcggcagccggctattattcaactttccgagccttgttgaagatagcctacaaagagaagatgctgcgtgagaacttgaacgactttttggaaaagattgaatggaaagaggtcaagaaagagtatctgacacttgatgaagtcaagaaactagccgctacaccctgcaaaattccagtcttgaaacaggcctccctgtttgcctgtatgaccggactccgtatcagtgatattctgaagttggactggcgtgattttgaagtcggcccagatcaaggctactacatccgtatctgtaccgagaaaacggaaaccgaggcaaccctccccatcagtcaggaggcactggagttgtgtggcgaatggggcaccggaaaagtattcaaaggcttaacccgctccatgactcatcatcccctgaaacagtggatagccgaagccggaatcagaaaacacataaccttccactgctttaggcactcgtatgcggtcatccaaatctctttaggcacagacatttacacagtatcgaagatgctaacacataagaatgtcaccactacacaaatctatgctggtgcgcccagaatggtcgcttaataaatacttctttagcaagaagttaggattgggttcgatatagtcctatcgtcaatcagtttatccaaaagggaaacccgatggagagtgtagcatactgattaaagctccaagtccactaatagtcaggtggcgactgaggggcaagacgaaaagacatacataaggatgaagccttgattggttgaatgatagttcagtggtaccaaatcttgcaacaacggaagactattatacatacgttgtttcatagtactctgcctattttgtgcgttagtgcagagcataaagaaccgactatgacacagccgcaataagcggacaagaacgaaagtcacatccgacagtatgtcgtgctaatagttattaagagaactaactggggattacctaagtcggaacgctggaacaaacagctataaagaaagcttttgaatatccgatatggtaacggaacttccgtagtagtctgagcaagggaaagccttgtacatggcgaagggaagtagtctgtaactttaatacaaacaacggaaaacgtgagagacgtatgagaaatccagagcaagtattaaacattttagctggacacagcaatgagcccgagtataaatacgaaaggctttaccgtattctattcaatgaacagatgttctttgtcgcctaccaacgtatgtatgcaaagccgggcaacatgacacccggcacagatggcaaaactgaggatgaaatgagcattgataggataaacaaactcatagagagtataaaggatgagacttatagtcccaatcctgcaaagagaacttacattccgaaaaagaatgggaagatgcgtccgctaggaataccgtcttttgaagacaaattggttcaagaggtagtaagaatggtgcttgaagccatatatgagggacactttgagtggacatcgcatggtttcagaccaaaccgaagctgccacacagcactgaaaagtctacaaaacaatttcaacggtgcaaaatggttcattgagggagatataaaaggcttctttgacaacatagaccataatgtgctgatagaaataatgaaagacagaatagcagacgacagatttcttcgtctgatacggaaattcctcaatgcagggtacatggaagagtggcaattcaacaagacttattcagggacaccgcaaggtggtatcataagccctattttggcaaacatatacttagataagttcgataagtacatggatgaatatgccaacaaattcaataaagggacagcaagaagccgcaacaaggatatttgcaaactcaacagcagagtacactacctaaaacgtaggataaatgaagtagaggatgtaaacgtaagaacaaggatggtagaagaactgcacgaaaagcagaagctgatacttacaatgccaagtggcaatgatatggatgtaaactttcgcaggttgaaatatgtgcgctatgccgatgatttccttatcggagttatcggaacgaaaaacgaatgtgagacaatcaaagctgacatcactaagtttatgcaggaaaagttaaggctggagatgtcacaggaaaagactttgattacaaatgcacaagacagcgcaaaatttttgggttacgaaatatatgtccgtaaagactatgccacaaagagaaacagtaacggaacagtgcgcagatacttcaacgggaatgtgatactacacgtttcaagagaagtaatcaagaacaagctgctcagcctcgaagccatgaaagttgtcaccaaacacggcaaggagacatgggtgtcaaaaggcaggacttatatgattgacaatgaagcgcacgagattgtatctcagtttaataccgaaatacgagggttctacaactattactcaatagcaaacaatgcatcggctttgggacgctctttcggctgtattatgaagttctccatgtacaaaactcttgctcaaaagctgaatatgtcagtgagaaaagtcattgaaagataccgcaaggacaatctctttgcagtaccttttgtaaacaagggaggagaaaccaagtacagggtattctataatgagggatatgcccgcaaaacggattgtgaaacagccccaagtgacaatctgccgtacatgttcaaaacgccatcgttgagtctaatagaaaggcttacaacaaaaacgtgcgaactatgtggcaagcacggagaagtggtaatgcaccatgtccgcacactcaaagagttaaaaggtaaaaatgactgggaacgcaaaatgctctacatgcacagaaagactttggttgtatgtgcggagtgtaacgcaaaaatccagagatgtgtcaagtaagatgatgttacagatggagagccgtatacatggagacgtgtaagtacggttcgggggcaggtaagcgaaaacctaccgctgtaaagcggaaaggcgttgtttgccgagcctacatttggtcaattcgaaaaaacgagagacagcgaataagatttcgttgaaataatataactcttatcttatctataacaggttatatctgataaatctatcggatatgacctgtttttatgtttgctttatctgacagaatcgctatctttgaagaaaattgagtctttaaatgaataactacagctatgataaaaatatatggaatggaaacttgtccggattgtacgtatgtagaagaacaagtaaaaggtaataaccaatatgaggtcatcgatattggtcaacacgtaagagatttgaaagcattcttgagattacgggatcatcatccagcctttaatgaagccaaaagtgttggagccgttggaattccttgctttgtattggaagacggtacagttactttgaatccagaagatgccggattacgttcacgtcctattaatgaaggagcaacatgtaatattgacggaagcggttgttgattatggtacagaaaattcttttccttcacggtttctttgcatcaggtacatgtatcccagcgcttgccttgaaagaatatttcagcggtaaggcaacagtcttgagtccagacttacccctgcatccacaggaagctctcgactttatccaaagattgtgcaaccaagaacaacctgatatattggtaggaaacagtaatggctcgtttttggcacagatagtagcatctaaaaacaatatccctgctttactctgaaatcctcatttcgaaatgacacgcttcttgatggaacgtattggttcgcatgaatacaaatcaccacgagctaacggaaatcagcagcttgtcattaaccaaacattgattgatgaattcgcagaacttcaacagcatcaatgggacaattgtcaggtagctaaccaagaaaatatatggggaatatttggtgagaatgaccatctggcacactttgagcctttatttttaatgcattataaatattcataccactttcctggcggtcatactccaacagctgaagaagtacaaaagtattatgcgccattagcggaacgattattagaattatagcataacttatcatataatatagaaagaataccacttttgtttattatatgataagttataaattcatgtcttatattcaatcccataaattaatccgcccctatctcatctgaacacttcttacttaccaataataatcaaactatttatgacaattagtgacgtttgatgaagtctgatgtcactcttgtcattttctgataatacataatcagtaaacattacctttgcttacgaacagttaaacatatggcttatgtatttgaagaaatttgaatattttattttagattctagtgtagctggaacattacttcttatggcacttgctatacgcattgaagcaatcaatgcaggctttgatcagttcagctcaaatattatttttatatcggtctttataatatctacaggattatatatatcaatgcaaattgcattatatgagataattatatatttatgtcatcatagcaaatctttgtctatccatgaacatcttaatgattctgtgattgcgcaagaacaaacatttatggaatatgaaaaactccgttcgaatactattacagaacagaaacgtacgaacgataaaaagctagagttagtacatatatacatccatcaaacgatggctgcttatacaagccaagaaaatctgcagcgcctctgtgcttatatttcagatttctttcaggaaaaaactgctatcgaaattattcctataaaagtagattcaaaattgaaagctatagatgttatgcatttgggttggaacataggtaaagcattaggtaaacgacgttcatatacagcagaattcattaaaaaagtatttgctgataccatgaaagaaaatgaaatcaacacgataatcaaaaagatgtctcactcagaaacagaatgcctgattaaattaaatccagatataattcaataaatcagactttatattctaaatactgcatcaacaaatattaatcctcaaaagcaaaaacagatagtatgacaaaagaacctatcacattcgacaaacttccgcaggctgtaagctatttaacagaacaagtagagaaaatttatcaattagttgaaaccttacaagcacagaaaccggataatcagcatcaactaattgacatagataaggctagcatacttatccaaaaatcaaaaccgacaatctatagacttgctcgtacaggtctcatcccaacctataaacgtggtaaaaaattatatttctatgaggatgagctccttaaatggatagaggctggcaaaaaacaaagtcaacctctatcctatcaggaacaatccgcacaaatacttcgtgggatgaaacgtaaacctagaaatggagttaatatatagaagggaaaaatttaatattctctttttgcaataactaatttaataatttatttatatctaacactttgaaattaagtcagatataaataattaatcaaatttattctaatattcatagaatgcattataaatcgtgattattgttaaatattccatattattggttatcaataaaaattcttgtaacaaatatgttgatacaaaaaacgtaccataaaactaccactattgattctttcaacacatgcaatttttacataaaaattttgttcttcaaaatttaatttgttactttgtttataataaagacttagattattaattttttcagtaatttacagatcaaataattttcttggttttatgttactgttagtaatacatcataagtttgagaaaagaagtatatcttataaagtgcttacaaatacatctaataagaaaaactgaaaattgtgacaattgtttatgaatagcaattatttttatagcaatatagtacaaacttctaaaaacaaaagttttttggaagaaatgcaatctatagctgagtctattaaacaacaagtatacgtgttgtccggtccacttatagatggtaaatatcaatacaatgatgactcgttaataattttattatcttcaaaaaagaaaatagccttcgtcacaactagtaaaatgaatgataatttcaatgatttgtgtgaagacataatagaagatattggttcagtcagcgataagtatggatataaggagaagatagggcgtcctagaaaatggagagatagattaactggtatttattcattaaaagaaattgacgatgtacgagcatggttttgcaatgacatcgttataaatgatactgctgatttcagaacactagatttactgatatctctttttatcggtagcattaatgatgtgaaaaacataacagcagaagaaccagacaatcttttagataaggtcaaacacaaaatccagttgtttgacggtcaacagacccgttttatttatgaggaactagatgctgaaggaaaaagaatcaccatacaaggtttatctggtacaggaaaaacagaactattaatgcataaactaaaagatttgtatgtaaagaatgaagatgctgttttggctttacctgttttaacaaaattctatctcgaaaattaaaagaaagaatacctgagttctttaacttcatgaaggtagaacagcaaattgattggaacaaattactatgtgttagtgcatggggtaactatggaaatgagtattcaggtatctatagatatatttgtagtttctacgatataagtttctacagtttgcgggaatgtggttcttttgatgtagcttgtcaaaaagctatcgaacaagttagagatagaattaaagcttatggacatgcttttacctatatatttattgatgagagtcaggattttaaagaatcattttttaaactatgcgaattagttactgagaaaaaatgttttattgctggtgatatattccagtccatttttgaagaaaagaaaaaagatactattcctcctaattttttgttgagtaaatgttatcgtacagatccaaagacattaatgtttgctcaagctttaggtatgggactttttgagaaagagaagctatggtggcttgacaaagaacaatgggaacaatgtggttatcatgtagaaattgaaggtaaacaatacacattaacacgtgatccacttagaagatttgaggatattgatcctgattttgatagtttgaaaattattggtatacaagatttaataaaaggaattataaatcttataaaaaaaatatacgatgaattcccaacagtgaaacctgatgatatagctattattttcttagatacagatcaatatatttatcaatcggccagcagtatcgaacgagctataggagtagaacttggtatggaatgtaacattgcatatgaatccaagaagacagaaaaagggaaaatactgataagcaataaaaataatgtaaaaggtttggaatatccttttgttatttgtataacaaaaaaaattcttaaagaaaaaagttatcgtaatacattgtacacaatgctcacacgatcatttattcgttcttatttggtattacctaaaggcaatgacaatggttttacccaagaaatgtatagtggtggtcaacgtattatgaaagaaaaaaagatagtagtaatcgaacctacagacaaagaacaaatagatattaaagcttggataaaaggaggaaagcaagcattatcattggaggatagaattaacaatgtatttgaagaattaaacatcacaaatcccaagattaaagaggctatccgaaaatcgttagcaggcattccaatgaaaaacaataatgctcaattaaaggaattaatacaagcattcctaaatactattgatgatgaagattattttgcgtaaaatagaatcttatgaaaacaagaagttttcacaaacattgaaacaacataaggattacacaagagtattgcttgaaatcacaagaaaaattctctctaatgatgattctatagacataaaagatacatctttatcatcacaagcctatctaaaattagctattgacaagcaaagtagaatttttatttatctttccattgataaattttactctttggagtatccatgtcaggtagaagttgataaatttacacaacaagtgaattctgtttatacaacttctggcattaattgtacgttagaactcatttcaaatgcgatttctatacttgacgatgtaaaatgcgattctattatagatgtgtatgaatcaagagatgaagaggatactttcttaaatatagaagcctacaagttgttagaatacttttgggcacatgaaccttgttatctaagatatgattatgacccaaagagttgtaatggtgctttacatccactcaaccatctagacataaacatttctttaaaaggttcttacaaacttggactaaaatcaaagctttctccatctgaatttgagaatattgtaaataaaaacactgattgttattatttactcgataaattaccaccacatttaacgattttaaaagccaataaaagggccaaaaacagaaaaaagaaatagaataaaaaaagtgtaaactaattgaatgctaataatatgtatttccctaacaaaaagagaataatttattacaataagtataatgaaagcatcagtacaaattattgcatattcgtaggttttaaattataaaataatcaggactaaatcacggtatttttaaaagtaaaataagtggacttgatatactttaataatcccaccactaatttatatatattcgaaagacacattgaagattataaaatcaattaaaatcgatataatctatttatattggattattttgctacaattatcaatatatgtagctcttatctaaagaactaaaccatatcctccgatatatttttcgtaagaatagaataaaaagtaattgaataaaataaagtatttctacggcataggaataagaatcattatagttttaatttctactataattgataaaatgaaagttaaacattacaagttcgcaatataattttcaaccattatttcatttcttactgcaaatatcgccctttgccactgactgtgcaaggcggccctatcgggctggttggctggaaaaaaatcatcctcgcttcgctccggtatttttttccgccaagccttgcaccggtcattggcaaagaacagccgggccagtaagaaattgaaatactggctccacggagccggtcatgtctaatttaaataaaagaatatgactgaagaagttggaaagaaggtatgtgaaggtacagtagcagacctcatgaaggacaagaccggaaaacagacggttatcacgttgacaagaaagaatgcttaccgagtgaagaaaatcagagaacaagggacggatgacgaagccgtcctttttcatttccgtaagcgctgtacgggaatgggctcctatgtacacaccatcgaaacggcagacggggaaacagaattgcacccgtctgaatttgaaaaatgggaagctgtggaattcctgtatcccggctatctggaggatctgcttgatactgcttataacgcgtacagatggagttccttcgaacctgaagcaagggcggaaacagacatcatgcaatatgaaaaacaacttgtagaggatctgaaactgattccggaagaaaagcagaacgagtatgtcagtgcataccatagcaagttctccgccttgctgggcagtctctcacgatgtgccagtccaatggtgacagggcctgccaaattcaactgccagcgcaacaacaaggccttagatgcataccagaacagatttgatgaatttcatgactggcgtaaccgcttcaaggctgccatggaaaggatgaaagaggctgccaaaccggaagaacagaagcaggaagaggcatggaaccgcctaaagcgtgacattgcaagcagcgcacagaccattcatgatattgataccggtaaagcaagaggatacagccgtgccttgtttgtcagcagtatccttaataaggtaagcacctatgcaggaaaaggagaagtggaaatcgtacagaaagcggtagacttcattacagacttcaatgcgcaatgcaagaaaccggttatcactccgcggaaccgtttcttccaactgccggaaatggcacgccaggccagactgaaacttcaggaaatcagagaacgggaaaaccgtgaactgaaatttgaaggcggaacgctggtatggaactatgaggcagaccgcctgcaaatcctgtttgacagtattccggatgaccagaggcgcaaggaactgaaatcatacggtttcaaatggtcaccgagataccaggcatggcaacggcaacttacacaaaacgccgtatatgcagtcaaaagagtgttgaaccttcaaaacctataagacatgaaagaccgattgaaatatgtaatcgattcccgctacttcgacggaacatgcctgacaagtatgagtgacggattccataatgactatggtggggaaacaatcgaagaactgcgcatacgggaaaacaatccctatctgaaagcagtaacaccttctgatatagacaagaagctgcggctatacaatcagtccctgtccgaaccgttcaaggaaatcaccgaagaagactactatgacctgctggatgtactgccacccttgcgcatgagacaaaactcgttctttgtgggagaaccgtattacggaaatatgtactctttctgctttacccgtcaaggaagatatttcaagggcctacgctccgtacttactccgcaatccgaactggacagtcagatagaccgtcacatggaaatcatcaaccggaaagccgtgatctcaaaagaggaaacaagcaaaacaatcagcggaaccagactcactccctattatttttcactggacggaaaacagtccgtattcatctgcaaccttgtcatccaatcagattccggacaagcaagaacggacatggcgaataccctgaaaagtcttcgccggaaccattatcagttctataaaggaaaaggacattacgaaactccggacgaactgatagaccatgtatcaggaaagaagcttacccttgtttccgacggacatttctttcaatatcctcccggcagggaatccgcaactttcatcggacacatcaaggagacatcagaggaatttcttttccggatctatgaccgtgaatatttcctgtatctcctaaaaagactgaggaccgtgaaaaaggaatcggcacagggacaaataaatatcaaatcataacattcggggaatgcggtagaatgactgccgtattccctcataaaaacaatacaagtatgaacaaatcgaacactctatactggaaaacagccacagatccggctgagcacattgaggtcagactcgtccttaacagttatatcgacaatgacaatctgtatgtaggacttgaatcccggtctaaggagaatccggaatgctgggaatcctacacggacatcaccgtcaacctcaattcccttcccccgttccatgcttatgtggacaaccgggactgcaacagacacgtacatgatttcctgaccagtaatagaatagcggaacctgccggatttgaatatcagggattcagaatgttccgcttcaatcctgacaggttgaaggaactcgcacccgaacagttcaagacaatcagcgccaaactgccaccacaggatgacatgataaaggacatcatctatcaggaaagacatttccctttgagaactgttcaagacattcacggaatatatcttgtttcaagcaaggaactggaagaatccctgatcgaaggagtacggaacctggatgctgcggcatatgaactgctggatggcatctgcctgttctgctccacacaagaactgcgctatcttacggatgcagaactgatagaaacaatctacgcacaataaaaaggaggaacaaatatgaaaaccggagacattgtatttctgagacgtccctataagggataccgtgccgtcgaactgatggaaagactggaatgccgctggctggtcaggattgtcaagagcggtcttgaactggaggtatatgaagatgaacttatatcagaattttaatacgaataaagtgttatggaaaaatatcagtttgcattccattcggaaataatcggctatacctctccccatatcggcgaggtcagaaaagccatacacagaaaagtggaaaaggaaaagtctgccgccataaagaatgatattgagctgcacatgtacaaggtgcatgacggcataccggttctccttaacacctgctacctgtatgatgaaaaaggatgtatggtacacggaagtatcaagggaaccaaggattatctgcttgagacatggagataccatacaaacagacattccaaaggtttcagttccacaagaatcaggccctgcacgacaagcagggctttttcgtttgtataactcttaaaatcaggaatcatgaaccagacattacaacttacagactatattccacagtatgtaagcctctactacgtggactaccgggatgaccttgatgagcatgaagacatccaggaggaatgcatccgctccaacaatatggaaaaactctatgaaaaggtatacgaatggtatgaggaacaggaaagctcaaacatgcacgactatctggaggagacaagaaagaacatggaagcggacaatttagccggagagtttgaagagcatgaagatgaaatcagggaacttatctacgaccggaacgattccgacccggtaaaggacctgatacgcaactcatccgtcactaatttcttctattcgcttggagtggaaatcagcggatatctgaccggttgttcactgcggggagaatcagtcgccatggcctgccataaggtacgtcgcgcactgcatctgaaaaaggggcagtttgacgagaagattgaagaactggtagagaatgccacatacggcggagaactgcgcatctacttcaacgccatgtttgacaggctcatcagcaaagaccctgagaacgatttcaagagcatccgtttccacgggaatgtaatggtggccattgccgacagccggaacggttccggacatcatgtacggattccgctggacatcactttccctttccgaagagagaacctgtttgtcgattcacaagtacactattcctatgccaatgaagtctgcggcatgaccaatgactggtgtgattccacaaaatgggaaacgggcatgataccttttaccggatctgtccgaaaaagccgtatggctgaatacaagaaacaggaagccgcttatgagcagacattccgagacgggaaatgcaccttcggtgacatgaactacaaacgccaccgtgacgtgcggtattcgaatgaatatcctgccggatgcagatgccctcattgcggtactttctggattgactgaaaaaacatttaccaaccaataaattcaaacgatatgaaaatctgctgttcacaagagcattacgacaaggtcgtacagtatgcaaaatcaatcaatgacaagacactggaaaactgtcttgaacgtctcagacaatgggagaagaacgagaaccgtccatgcgaaatcgaactctattacgaccatgcgccttattcgttcggattctgcgaacgttatccggacgggaatacaggcattgtcggaggactgctatatcatggaaatccggacgagtcctttgccgtcaccatggaacgtttccacggatggagcatacatacctgacatatatgcgacagtctgtattggggagcctcatgcaatatggggttccctttttttatgccgcagacatgatgacagcatcctcatttcttgctgcaaaaatagctgtttgccgcgcaactcccgcaaggcggccctgccgggctggttgtctggaaaaaaatcatcctcgcttcgctccggtatttttttccgccaagccttgcagggatgcgggcaaacagacaacagggacaacaagaaataagaatgcctgtaccttacaggcagacaatgtataacaataaatatcagaagtcatgattacagaccagaagacacagaacaggcttcacgcggataccggaacagaactgttctccatcagacaaaggaaggaagccgtcacaaggatgctggacattctgaaagaaactccggaatacctgcaggttatgaaccatataccggcttatgccatggatgacgatacgtcagaatggtggaattcggaagaatcggaaaatttcatgaactcactcctggaagtgatggaaagctatactccggacggatacaggttcggaccgaaatccggcacgactgacctttacggctactgggaaagcaagaccggacggacaaccctcttccatctgcttttcagtctggaaagcggatatgaatggggaaaaggtctttcccatgagaaaacggacgcattctacaaggaaataaaagagaaatttcatggagagggattcgacacggacagaacaggctgtacatcacaggctatgtatcttgtaaaaggaaagacacgcctgtacgtgcatccgatggaaataagcggctactgtgaaacactgcatattccacagattacagccatactgaaaaaaggaggccgtacattccgtcttgtaaaggatacgatagcggaagaggtgtattccttcaccgatgaagaagaaatggaatattaccgtgccagatacggaatgtgcatccaccggaatatactggatgccttcagcaaccgccgggcagggaaagaggacatactttccatgatggcatcacggataaatgtggcgacgacatcacatctgcacggtatcggatatgattcgcctgcatacaggtttgtgcatgaggcatacgacagactggtaaacaacggaaagctgaaggagaatgtccgggaaatcggttgctgcaacatcataatggccatttcaaataccaacgcaatatgagactgaattacaatgacatgctgcttctggcaatatgggaatacaacaggagacaggacgaggatctgaccctggaactgtttcaggaaacattcggacaggttcccggcgcacatttccatgacaaatgggtgcattattacaacaggaacctgctgatgatggccgcctatttcaggggtgaggaagaaaacggccagaaattctgtgatatgatcacccgacaggttgaacgctatacacaaaacaggaggagaacaggatgaatacaaagatacgatatgaccttgacagtcttgaactggcaaacggtgacttcgggtatcccattacagaaaaggaagtacggaaagtgaaccgtatgctggaactgatggagaatgtccgaagcaggcagatgtgcccgacagaaggagactgcgtggaatttgtctcacgttcgggtgactatttcggaaaagctcatatagaacggataacaggaaaatatgcggatatatgcctgataccggaaacggtattctgtttcgatgacatgggaaaagccgcctatgataccaccggaagtccctggacgcaggtcaatatccggaacatgaaacccgcaggtagtgaaatccgcatattcagaacatggggattcgggaagcgcagcaatacgggcagtctcaggttcgatgctccggtcaggaaatgggaatacagagaaccgaatccgttgtatgacgattacaccacccgtaactggttccgctatcatatcatgaaacaccgggacagggaaaggacaggcgaatacaccttccgcagcgattcattcacgctatacagccggagcgagctggacgagctggccgcaattctgaaaggcagactctacaagggaatcctgcctgactctcttgtactttggggataccgcatggatattaaggaaatatcacgtgagcagtggaacggtatgggacagcacggacaaatccgcatgaaattcatgggatacggtccggtcagaatccacacggacaatgaaaaccataccgtaacagtatacagaatcaacgacagtatataaccaattataaaattaaggaatatggcacgatatgaaatctccaacgaagtcaagccgctcgacaggcttatcacaggctttgcctcctcatgcggctatgaaatacagaccgtattcaacgacctgctgcgtttcatcatccacggcttctctccgggagcaccgccaataagcaactggaaatacaagcgtcagcaaaatgcctcgttcatggaaatgacagccgaatggacacgtatcatgcagaaacaaatcggcaggtcgggctggttcgacgctttcggtgaactccacatggcttactgctcaaaaccgggacagcaggcaaacggacagttcttcacgccgtcacatatctgtgaactcatggtcatgtgcgcggcaggtaaaaaagagaccggacagaggatgggagatcccacatgcggcagtggaagactcctgctggcataccatgcgcacaatccgggaaactatctggtcggagaagacatcagccggacctgctgcatgatgaccgtatgcaacatgctcgtccacggatgtgtcggggaagtaatctgtcatgacagtctccagccgaaggcattcaccgacggatggaaagtcaaccaggctctgcccttgacaggaataccttctataagacgcatgaaggaagaggaatacaggaatcctcttccggaaaatatcggacgcttcaaagaggcagtccgtatcatcaacctattggacaaataattaccaaccttttaaaaaatataattatggaagctttagcaacattgaacaatcagagacagtttgattttcagaacaacggaatcgaagtaatggaccttgaaacactacagcgtacctacaaggagaacgacatctacggcaatccggtcaggggtatctaccactaccaggtcatccagcgcatgacggacatctgccgccgtcacaacctgaactatgaggtggaggaaatcttcgccgcccagaacaagaaccgtacacagcccggtgtggtcatcctgccgcaggtggaacagacctatggagagaaggcggtagaggcacatgtactgcgaagaatcttcaccaccatccgtattctgaacggggataccgacgaactgacaaccacattagtggtagcctaccatcaggacggtattcaggcggcaataggtccctgcgtacgtatctgccacaaccagtgtatcctttcacccgaacgaagcgttgccaactacggcaaggacaaggtgactaccgaggaactgttcgggaaggtggatgactggatgcgcaattttgagcgtgacatggatgcggacagaagccgaatccaaaggctcaaggaaaaggtgttgacacccggtgaattatacatgatcatcggtatgctgacggctctgcgtgtatcgcatgacagtgcagacaaaagattggcatcacaggtggacacctatccacttaaccagggacagatttccgtgtttacggaagaactgctcaaactctcacttgaacagccacgcattacagcgtgggatgtctacaatgtagcgacagaaatctacaagcctggaaagactgattttcctgccatgattccacagaatggagcaatggccgatttcctgctttcatataaccagaattagaatctgagaccgaagacaacaggcccggttccgtcaccagcggaatcgggctttgtattttattaactgtaataatcagataagatatggcagcaagtaacagaaaaaaggctgaaatgtatatccttttcagctgcaacgcatggcacgaatacagttcattcgagccaaaggcggttttctcttccatagaaaaggcagcagacttcctgcaaaagaacagaagaaaactgaaactggaggaagatgacgtcgaatgtttcagacagcacagtcagactcagggcagaaataccaattacctggtacagtcctgtccctacaatccagtccgtgcaagagacttggaatgacaaagaatccattcataaacaatcatataaaaatatacgactatgacaaatgatgaaaacacttacatcggaatgtccctgccggaaggaatacggtacatcaccgtttttgaaaaaggggattttgaaaactgcggaagaatactcaggacattctaccgtacggaagacagggtgagaaaattgctcgctttgggaaacctgctccatttgggaggcagtctctcatcaaatgaaaacaagacaagctgttggcctttgaataatgggaatcccattcacgaagcaaaggaaatatcaggcaaggaaaagttcttcctgctcggtgactggacttacctgtatgaaaatggcagatggtttctgggctatgaaggaaaaatctatgaaatcagcaatcctgaattttctgtctttgttcccgacaaggatcatacaccttcccctctggacaaaggactttcctttgccgtaatcggcgaaacgggaaaactggaattcactccggaaattgtcaacggatgggatacctggaaaagccttcccaaaagagtcagtgaaaaaggaaaaacggtatatgtattccgcaaaacacaacttataaaagtcatcaaacctaaaaaactgaaatcatgaaagaaatcaatatgacaaaggctatatcatgtatgccggacaaattcatcacaatggaaatggttgaactggccgcgaccgaacaccgtccggaactggtcaactatctgccggagaaatatattacttctgaaatacttgacagtatattcaaaacagatgattacggatggcgttcctggcagctttcgaagatacctgaagaaaaacgaaactgccggatctgtctcaaggccataaaggctgacaagagtaatttcccggacattccggaagaatacaggaacggtgacatccttgaatcgctgttcgcacacaggaatttcatgcactacctgcatctgatcccttcatcctcatggaacaacgaaacggttcgtgatgccatatactccctttaccgtgacgtacagcaaaacggaggttaccgatactgttctgagaggaatgaacagcagttcttatatgaaacaagcgtcatgctttctttcgttccgcgacaagccaaggatttcagactttggaaagaactgatccatgacggacgtatcgcaaccatgactatcgacaaaatgatgcctaaatgtttcaaacaggcagcatactacaaggaatgggccatacgctgtatcaaggaagtggatacacgctggcttgactatgacaccgtatggaaggccatctgtcacaagacaggcaacctgcatggcattttcgattcatacggacattacgagtggttctccaaacatgcggatgatgccatggctgacaaagcaatggagctggaacctaacctgtttaacaaacttcccagacggttccggacaccggaaagacttattcatacacttgaagtaaaaagagaaatcaacagttacaacttcattcttgaaccgaacctgatgacgaaagaggtctgtatggcactggccagaagggattcgttctatccggatattccatcggaacgctggaacagggaacttgtggaatatttcaccgaatacggcaacagcctgtactggctccctcaactgccaaagaaactacagaccagaaaacttgccgaaaaagtgctgaagaacaaaccgcagtacttttattacctgcggatggaattcattacacctgaaatgtccaagcagttatgcaggagtaatcaggataatatccaacatttcaaggagcgggtcatggaattccagaaatatacaggacttccagccgaattctatggatgtgaaacagatttcgagcatatcagggaccgtaatgacagccgccgatactgccggataggactgacttacatcgccttgcagaaatgcaaacacggatggcatgaaagcgaatattatcttatcatgacacgccatcccaaccgatatatgcctgccgaaacagtgttcaggaaacagattaccacattccaccggacatggctggaaaagacaatatgtgacaacgacccgcaattccggattccgaagattcaaaaggatttgaaggatgtacaggccatgcggtattatgaggtggaacatatccgcacaatactcggatgcgaaatattccgcaactctttcatgggacggacaatggaatactgtatccgcaaggacgggctgacctaccatgacaggaacatggaaaggctcgcctccggcctgcaatacaagatccgtcagttgaaggagcaggctatactccctaaaggtactgatgactctatggaaataaatgcagaaacggtacaccgcaatatggggtattgtctgaccggaatagaagcctttgcggaagactacggactggacgtagcccggacctataccctgaaagaactgaaggatgttatccatgaacagggatacaagccttcactggagaagtacaaaaaagaagtccaacatctaaaccttatttgaatatgaacatcttccaaaaaagaattgaaaacctgtgcgatgaaatcatcggcaggatacttgcactgatgcaggtgaactcggtttccgaagtaatactgacagacaaagacaatccggtttacgtaatctggtttgacaagataggtgatccgtgcgaatgctccgtacacaaggtaactgctgtcggagaaggaatcacacttgaagtccatgataagataaccggagaaaattataaggtcacaagccgccatgaggcggctctggccaatccggtatggcttaacgatattctggaatccataacaaacatcttccatataaaagaagataatgttatatgctgcaaatgcggaagtacaaacgtaacctgtgaagcgatgataaatcccaatacaaaggactttgaccactatacagatgactcttttcagtatgggtggtgcgacaactgtaaaaccggagtagtcataagcgacacatctgaagtaaagaagggaatatctcagaaatataaagagtttacagagacttacaataccgaaccgcaactggccttatgccgtatcatctggaaagatgatatgaaagaaacggaagtttccatagcactcgaaaacattccggaagagcatgatgatgccatcttcttctattgcgacagcctgtccgatttcatggcgttggcagaatacggaggagaagacttcatcgttacggaatgttttaactttaccaacttggaaaatgaggaataatttatttacatcttttcaaagttgcctgatatgtaaactttatatatatttgcagcatgaaacaggaaaggaccatatcagcctacaagaattatttcatggactttatctcatctctcagaaaagaggaagcccgtaagatatactacattcttgatatgctgaaagtacaggaaagggtaagcagcaagttcgtaaagtatctgcgcgaagagctctatgaaatccgtgctgaatatggaggcaacatcttccgggtattcttcatatttgatgacgagaacatcgtaatcctgttcaacggatttcagaaaaagacaaagaagacaccgccttctgaaatagaaaaggcattaaagataaaggaggagtattatgaaagcaagaaatgaaaacctgaccagcatcgatgctatcatggatgcggaattcggcaagccgggaacacctgaacgtgaggagttccgtaaggaggcatacgcctactgcatgggacagattatatgcgatgccagaaagaaggaaaagatgacccagtccgaactggctgaaaaaatcgggaccaacaagtcctatatctccagaatagaaaaaggtattgtagatccgagtatcagtacgttctgccgtatcattgatgcactcggattgaagattgaaattgtcaaaccggtattataatggaaaattatcaggaaaaagccagagaaaacttttaccgcaaccgtccatacggcattcacattgattatgcccgaaaaggatttgtactgttcaatcactatacaaacagtctcggcaaacaggaaatcggttctattgaaggccttccccttgaaaagttcgaggatgtggacgcgataccattgaacgggaaaattataaaaaatggtaaccagacaacagacatctatttctatacagacgattcaaatccttacaaaaacatgaagctggatatggatgcgctgaaacagtataacagatacatttatccgttaactctttttctagataggatattatgaaataaatagttgtaatctatatcaatgtttatattactcaagtcatagacaaaagagaatatatcaaagatataattaatcaaactagctacaacactaatgttcagaaatggactaatattgatttattgtttaattaacttttctatttttatttgtcgacatagtttttcattacagaaataaaaaatataaaatgaaaaatataaaatgaaatgaaattcccatgagataaaaaaaatcacgccaaagagaatgtaaatagtcaagctgaagttacctttgtatagtgtaaccctaaatgtatcagttatggcagaagtgacattccctcagttgatacagcgtgcttgcggtattgacgtccatctgaaggttgtggtggcgacaatagacggagtaggcatccaacgtgatacccgctcattcaaaaccttcacgagttctttgaatgaattgaaagaatggctattgtccaatggtgtaacgcatgtggcaatggagagtaccggtgtttactggaaacctgtttataaggttcttgaagattccattcccgatgtatggatagtcaatgcccgtcacattaagaatgttcctggtcacaagacagacaagatggacagcgaatggatctgcaagcttcttctggcaggtcttctcaaaccgagctatattcctcccaaggagcagcgtcagcttcgtgacctgacccgttaccggaacaagcttattcagcagatagcttcagagaagaaccgtatgatgcgtattcttgaagactgcaacatcaagctttcaagtgtagtaagtaatacaagcggtacgacagctacttctcttattgatatgctttgtgaaggtaaagtccttactcttgatgatataaattcagtttatcacggtaaactgtcagccagtcctgaagaattgcttgaggcgtgtaccggttttgttgaagagcatcacatttatcttcttcagatgatccgaaaggatatagaccagactcagactttggttgatgatttgtccgaacgtataaagagactgttgtccaagtacgagaatgtccttgaacttctcagggagattcccggttttagcaccaaggttgtagaggatctggtttctgagataggtcttgacatgtcccacttcccttctgaaaagcatctttcgtcctgggccggtctttctccgggcaacaacgagagtgcgggtaaaaaaaaaacgcacgaatcactcacggaaacaaacaggtaaaggcggtaatcacagaagccgcatgggctgcgacccgtacaaagaatacgttttttagtgagagataccatcgtatagctgcccgcagaggaaagaaacgtgccttgattgcagtgggacattctcagttgatatccgtttatctgatactgagcacgggagcccgttaccatgagcttggtgcacaatatatgcaatccaagatagagcagaaacgcaaggtatatttgtcttccgaacttaaaaagcttggatacaatgtctcgcttactaaagttccacaagcagtaacacccaattaacaatacagaccaaaggccgacttttactggaattaccatagtccgaaaatgaaattggtctcaacagctaagcgccaaagattgtgacttatgtacacgtgtatgaaacttttaaattcttagctgttgctatttgtcatcgtataatagccgcatttgtgttttcatgaatgctaatctttcttttgtcaaaccactcggttttatatcaattttagtataaatctgtcctactttatgtgtaggacgcttaatatttacgtatgaaaaatgatgtttttattacgggaacatctagttatttccctaataaccctgtctctaatgaagatatggaagatttcttaggattgattgctggaaaacattcaagagtcaagcctattattctaaaacaaaatggtattaaacaacgttattatgcacttacaaaaagtcaggaaataacgcattcaaatgcagaaatggcagttctttcaatacgacagttattacaaattgcttccatttctgaatcagatattgaactattgacatgcgcaacatcaagtccagaccaaatgcttccatctcatgcctcaatggttcatggatttcttaggattgattgctggaaaacattcaagagtcaagcctattattctaaaacaaaatggtattaaacaacgttattatgcacttacaaaaagtcaggaaataacgcattcaaatgcagaaatggcagttctttcaatacgacagttattacaaattgcttccatttctgaatcagatattgaactattgacatgcgcaacatcaagtccagaccaaatgcttccatctcatgcctcaatggttcatggattacttaaaaacaagccaatggaaatattctctgcttcaggtatttgtttatcatgtatccaagctttcaaaactgctttttggagtatcttgtcaggagagaaaaaaaatgcagtatgtagtacatcagaattaacttctgcaactctactttcaaagaattatgatattgaatacgaaaaatgtgcagatttgggaacacaaccttatatggcactcgaaaaagattttcttcgtttcatgttaagtgatggtgccagtgctgtattactccaaaataatccgggaaaagggaaagccttaaaaatagagtgggttgagatgacttcatttgcaaatgaactacccacatgtatgttcatgggagcagaaagtaacgataacggagaactgaaaagctggaaatcattcaataatcaagaaaggatagaccgttcattatttgtagtaaaacaaaatgtaaaatcattaggtaattatgcaatcccatattgggcaaaacatatcaagtattgctttgaaaaacacaacatatcaccagatgaaatatcttatgtattacctcatgtttcttccatgtttttttatgataaaataataaacgaactgaaacaggtgggaataggtattgatgaaagcaaatggtatacaaatttatcaaaagttggcaatatcgcttctgccgctatttttgcaattttagatgagttctggaatacacacgaacttaaatctggcgaaaaaatactgctgattgttccggaaagcggacgtttttcttatggaacagtactattaagtgtggtttaagtttggaaataaacaataaatcacttatttttgcacagataaaaaaagacatagtatagtatcatatatcatctttcaaacgaaaagtggaaaatttcaaagagataagatgggatatgacagcttgcgctatattcatatatagcacaggtgcgtcagcttcatctctaaggtattccactaccgcgtttgggttgttgattgcatctgtgctattattttatataacgtagctatgagatggaccctaatttaagacaacgaataattaatgaagcgtacaagctattcatttctaaaggaataaagcacacctcattttgtgatatagccgtagctgtaaacaagtctaaaggagcggtcatgcattattttccatcaaaaaatcaattagtcaacacggttatagaaaattgtttctttccttcatctgccctatctccagaaatggaacttttggcagataaagaatggagtgagtttatccagaattacaagaaccctattgaacgggcaatccataatttcccagacaaacaggataaaatcggattactgcattatatgcaattcatatcctcagcaaatgaatatatgagtgaatttccacaaaagtatcaagaactccttgctgaagaacaacgtttcctttttaatgtcataagtaaaacaatcaccaagcataatctgattgttaatgatatacaaacattcagccgacaatcatttgaaatgtcaatcggcaatacctttctgaaattgatttcttccaaataaagacttacactcctggtaaaaatagaaattcaatttgattaatcaaatatagtctatcccttacatcaaaggtaaatcccaatcctgatttgccagccgcatttattccttttttcaggagaattttctttatggctgacgccatgaaaattcacctgaaaatgaatgcggcggcaaacggattggcattaaatgaaagattacagggattaactgcgaccgacgtgacgcatagctgtaaatcaaaggcggctatccttatattctatatatggccgcataaatactatgaaaatccaccttactcaataataaaaacatagcctgcttatcaactcccgatataagacagggatttcagctccctccgatctgcatagtccggtggcttcgctatgcttttactcttacccttcctacctcttttcattcttttttcctgctgtttctacattctttcctatctctggtatgacatctgatgacatctaatgacttatgatgtcatctatttataaatcaatcatttattcaatttatcactttacatttggactgtgaaacaaatcaagtagtcactcaaaacataagattatggcacaagaaaacagtcctgacaaggaaaaaaggcaaggccggacaaagaaaccggaaaagccttatgtggaacaaattgacgaacttctgctggtacataacaagaatgacccaaaggagggtttgggagtaatcagcaagatggacgagaaaggcaattatcagacggttacaccggaagagaagaacgagaactcattccttaaattcgataagaattcaagtatccttgaaaacttcatcaagaatttttggagccagctgaaggaacctacgcatttcaggcttatccgcatgaccttcaacgattacaagcagaacaaacaggctctcaaggacctggccgaaggcaagaaaacagacgcggtaaaggagtttctgaaacgctatgaaatcgtaccgaaagtaaacaatcagaaaaacagtcaaacaaaagaggaggaaacaaaaatggcaaagaagcaggaacagacaacgcagactcagcctgaacaggtatcacaggtggaagctgccgcacaggggcgcgaacaacaagaaccgcaacgccagcagacacccacgtaccgctacaacgagaacatgattaattgggaggagttgggtaagttcggcatatccaaggaaatgctggagcagtctggacagcttgacagcatgttgaaaggatacaagaccaacaggaccatgccgctgacactcaacattcctggggtactgaccgcaaagcttgatgcacgcctttcattcatatccaacggcgggcaggtcatgctgggcatccacggtatcagaaaagaaccggaactggaccgtccttatttcggacatatcttcacggaagaggacaagaagaacctgcgtgaaagcgggaacatgggacgcgtggctgaccttaacctgcgtggcaacacgacagagccgtgtctgatttccatcgacaagaataccaacgaactggtagccgtacgacaggagcatgtctatatcccgaatgaaatcaaaggtgtgactctgactccggatgaaattcagaaactgaaaaacggtgaacagatattcgtggatggcatgaaatccaatcaaggcaaggaattcaatgccaatctgcaatacaatgcggaaagaagaggcatcgaatttattttcccgaaagaccaggctttcaaccagcagacgcttggcggtgtaccgctttctcccatgcagctcaaagcgttaaacgaaggccacaccatccttgtagaggatatgaaacgaaagaacggcgaactgttttcctccttcgttaccatggataaggttactggagggctccaatatacgcgccacaatccggaaacgggagaaatctacataccgaaggaaatctgttcggtacaactcacaccggaagacaaggaagcgttacgcaaagggcagcctatctatctggagaacatgatcaaccgtaaaggtgaggaattctcgtcattcgtcaagttggacctggcaagcggaagaccacagtattccagaactccggacggtttcaacgaacgacaggcacctaccatcccggctgaggtttacggacacctgctttcggcacaggaaagagcaaatcttcaggacggaaaggccatccttgtaacgggtatgaaaggtcccaacggcaaaccgttcgattcctatctgaaagtaaacgcaaacaccggacagctgcaatatttccaggaaaatccggatgtgcgccgcaatacctcacagcgtgcttcacagactgacaatatccagcagcaggaacagaagaagggagcaaaacaggctgtctgacctgaacgggattcaaatcattcaaatcatcaattactaaaaaaggaaagaacatgaacaagaccaatcatcatatctacaagactgaacaaatcgactgggagaaactggaatcggtaggtatcagcaaatcgcaaattgaaaaggacggaaacatggacctgctccttcagggagaggaaaccaatgtcatgtccattaaaatcaagactcctgtattttcactgaccatggacgccacactcagtctgattgaagacgagaatggaaatccggtcatcagcgtaaacggtatcaacccttcaggtgaataaataagaaaccataatgtatcatctctctttccatacggtaagtccgtatggaaagagataaaaacagaatttatcatgattgccatattaacagacaaaccaagtgtaggaaaagaaatcggaagaatcatcggtgcaaccagagtaagaaacggatatgtggaaggaaacggctacatggttacgtggaccttcgggaacatgttgtcactggccatgcccaaagactacggaacccaaaagctggaacggaatgactttcccttcatcccgtccgaatttgaactgatggtacgtcatacacgcaccgagaacggatggataccagacattgatgccgtgctccaacttaaggtaatcgagagagtgtttcaagcatgcgataccatcattgcggctaccgatgccagccgtgacggggaaatgacattccgctatgtctatcaatacctgaactgtacacagccttgcttccgtctgtggatttcctctcttaccgacgagtctgtgcgtaaaggcatggaaaacctgaagccggacagctgttacgacagcctgttccttgcagccgacagccgcaacaaggcggactggattctcggaatcaacgccagctatgccatgtgcaaggcgacgggactcggcaacaattccctcggacgggtacagacaccggtactggctgccatcagcagacgctaccgtgaaagagagaaccatatttcatcggacagctggcccatctatatcagcctgcaaaaggacggcatccttttcaagatgcgccgcacacaggatcttccagacaaagaatccgctacaatgtttttccaggactgcaagctgtcacatcaggcacagattacaggtatcagccacagcgttaaggaaatacttccaccggatctgcttgacctgacacaacttcagaaggaagcgaacatccgctatggctttaccgcatcagaggtgtatgacatcgcacagtccctttatgaaaagaaactgatttcttatccaaggacttccagccgttatctgacggaggatgtgtttgactcgctttcaccaatcatggcgcgtctgctatcatgggagctgttccctgccgctaaaggaactggaggtattgacatatccagtttgtcccgccacgtaataagcgcagaaaaagccaatgtacatcatgccatcatcattacaggtatccgtcccggaaatctgtccgaaaaggaaatgcaggtttacagacttgtagccggaaggatgcttgaaacattcatggctccatgccgcatagaaacgacaaatgttgaagcggtttgtgccgcacagcatttcaaggccgaacaaacaagaatcattgaagccggctggcatgacgtgttcatgcgttacgacatgatcccgacatcgggatattccgtcaaagaactccccgaagtggagaaaggtgataccctgaatgtatgcggatgcaacatggtgcacaagaaacagctgccggtaaatccgttcacggatgcagaactggtggaatacatggaacagaacggactgggcacggtatcctcacgtaccaatatcatccgtacactggttaaccgtaagtatatccgttattcagggaaatatatcgttccgaccccgaaaggcatgttcacctacgaaaccatccgtggaaagaaaattgcggatacttcactcaccgcagactgggaaaaacagctggccggacttgaaagcggaatgataaccggacaggacttcctgaacaggatcaggactctcgccaaggaaatgaccgatgacattttcaacacctattccacaaaagaagaataacatctatacctaatcaaccaagagaatgcaggcctgaaggtctgcattctcttgtatccgtacagaaaagaatctgtttttccgcttttaagcggcaaaggtcttggattgcctgccttttgccgcaaggctgccctcaagggcttggctggacaggaaaaaatcatcctcgctgcgctccggtattttttcctgccaggccttgcgcaaaaaggcaatccaagaggctggaggcctataaaatcgggaaaacacatcccgatgggattattcattcataaaattaaggattatgaaactacagattatcagaaagatcggcagacatgcaacagcgatattcctgattaccggaatatgtctgctgacaagtaaagggattgtccccaccggaatgattacgctgctgttgcttgcaggagggttcatcggtttcctgttcaggatactggtcatgattttcaagattcttattcttctgttcattgtaggattatttgtcgcataacccccaatataaatatacatatatggaaacagttgctataacctcacaagctcctgtcatgccgactgcatggccacagagcgaacatatcagaccggttaaaagacgtctgcccaatacagttgatgagcctaaaaacatcggctactatctggaatcgctacgtgatatttccagcaatccggacagagagaatattctgaaagaattcttcaaggaaacttatgtataaccataaaatttttcaattatgttttttcaatcaatttatcagatgattacagcaggtacggatctgaatatcaatatccgtaaagtggacaacagcctaagtatggcagtcatgccaaggcggaacagcctgaaagaggatacgcgacagaacatggtgccattggtcgtgaacggaacaccggcagaactggatatgggcttcctgcagaccatactccaaccgatacagaaggtacagggactgcttgtcaatgcggaaaatttcgagaaacaggcagaaaaggctacatcacaggccaaatcatccaaggctccaacaataccggccgaatcaaaggaagccagggaaaaacgggaaaagatggaaaaactcctcaagaaggctgatgaagcaaccgccgcaaaaaggtactccgaagcaatgacatggctgaaacaggcacgggtactggctcctacagaaaaacagaaggagattgacgaaaagatgcaggaagtacagagacaggccagtgcaggaagcctgttcggtatggcagaggaaccggcaccggtaattccccaaccacaaggcaatatgaacggtcagtcacaaccaggtatgcaaacaagcatattcccggagcaacagacccatactatgaatcctgaacctgtcatgcagcctgctccacagcagattccacagggaatgccccaacaggtacatgacacgaatggagcatatatccaaccggctccaaaccgtcccgtgatgcaaggaacaggtatgccacaaggtgcaacaatgcagacttatccgcagcagccagtataccatcccgaaacagttccttatccaccacgacagccacagcaaccggcaaacggccatataccaaacggaacggtacaagtgcagaacggaaacggacgggaataccaggctgtaccggctgctcatgatacattctgcttcgatccggaagacgagaatgacagggaacttctaagagaggacccgtatgcggaatatccggattttccggctgagtaccggatgaaggacgaggcacaggtagaaatgatatactgctgatatgcacaataaacgatttgtaaaaccaataaactataaacaatatggcactggaaattaaaggtatgaaaagagtcttcaaaatgaggaagaacagtaaggaaatcgtactggacgatccgaacgtaaacatgtctccggctgaagtgatggatttctattcaatgaactatccggaactgaccaccgcgaccgtacacggaccggaaatcgaagacgaccgggcggtatatgaattcaagaccactatcggagtaaaagggtaagaacatgaaaaaaggacaacgtaaagacaagaaaccatgtacacaacttacggaacgggctttggaaaatttagccagacttatcatatcggaactcgaaaatacggacataagccggggcatcaggaacagaaagaaaagaagactccctcccgcagaaagcctcatggttttctgaacacgagaataccttccatcgctcccgatctgtatgtggagaatgacagggatgtaacggtaaatgtcaccaccaaagagaatcttgatttcctgtaccgttcagccatgaagtatgcgcagctcctggacgtggagctgccataccatcctacaggcaggacttccacaagagagaaaatatgcctgctatataatgcactggattccatagtatctcatcatgtaaatctggaacttattggtgacaggctccagttctgcatctaccatttccacgaatggccggattatacgcttttctttatgccgatagactttacggaaaggctgcacggtgaaattaaaaagattacactggagttcatcagaaggttcatcaaacatcacaggatgatggatataaccgatactccatattttgatatgtcggaagtctgtatcgataatatagactttgaacagcttgatgaggaagagaaaaaggatttgtacagaaaggaaaagcttttcaggtcatataagaaaggtaaaatccataggaaattgtgcaggatgtactccagagctttctgtaggaatctggaagaacatatccgcaactgtaatccttccagcgacaaagaaagaaaactactgaaactgattaccgaagggatgtccctgattgcaaaggaaagcccttatatcttgaattatgattatgattttgcaagcgaaaaggaaagggatttcgagccgccaccgctcgaatatcagattctgctaacatattccatcacggatacggttaccaaggacatggaaagctgtttcagtaccgactgtcaggaaacatataaccagactcccgtatcatttatcttcatcacaccggaaacagaggaacttttcaagccgggaaactatccggaacgtttctccaaatggtttaaaacatttgtacaacatattacttacaaattataaagcatcatgaatgaactgaccaaaaatatgcaaaaaatgatggtaccgaaggcggctatcatagcctacaagtatgaagacagaagaaattttgataccaggtacttcatagaattgcgtcccatcggaaaaagcggacagatgggggcaggtatccctgttacatacgaattcatgaataccctgctggaatcctacacggaagaaatgagcggaataccggcaggaagagtccccgataacatgctggcctgcaatccgagaaaaggacaggaagaatatatctggtacaatccgcccggaaagagacagatgttctttcacaaggatctcaatatacaggacggcatgttcaatctgccggggattatctaccatgtaagaaacggaagcatggacgtgttcgccttcaagggaaaacgtccggtggagacgactccactgttccgtgccccgttcttcaacgtgaccggatcaagtgtctgccttggcagcagttctctggaaaagccacagaatccgactttcctttccctgttggaatactgggaaaaacggttctggctgactgaattctcccatctgggaggaaatgtgaatcctaccgtttcaaatcttgtcatcgttaccgagaacataagaaacaatccgttcgacatgaacgaactcaagcccataaataaaaaacttaaagacatacttccatgaaaaagatacattttaccgaccgctacctgctcaatccgcgtcatccggtaacggtattcgtcatcggagcaggaggtaccggctcacaagtgataaccaatcttgcacgcatgagcatggcacttcaggcattgggccatcccggactgcatgtcaccgtattcgatcccgacacagtaagccaggccaatataggacgtcagcttttcagtgagacggaactgggactgaacaaggccgtatcacttgtcacacgcatcaaccgtttcttcggatacgcatggactgccgaaccgcaatgttttcctactaggaatttttctgaagacagcacagcaaatatcatcattacctgtacggacaatatacgttcacgtcttacgctttggaagttcctgaagaaagtccgcaaagaaaacttcagtgaccattcggctcccatatactggatggatttcgggaacagccagacaaaaggacaggtcatcatcgggacggtacgtgagaaagttctccaaccttcttcacaggaatatattcccatgcctaaaatgaatgtcatcaccgaggaagtggactatgcaaaaatcaaggaaaaggaatcgggaccaagctgttctctggcggaagccctggaaaaacaggatttattcattaactccacactggcacatatcggatgtgacatattatggagaatgttcaaggaaggaaagacactgtatcgcggtgcctatgtcaatctggagacattgaaagtaaccgcaatcccggtataatgcataagtgaccgtatcatctttccatcagaatacggtcacttattctatttgctacttattatttactatgttcttacctcgctggagcaggaaactctgtatctctgaggcgagatagaatgatttcccgttcttttcaaccgagtaatatttaatcttgccctcttgcctgtaacgtgccaaagttctttgtgacacaccaaggagttctgccagatccacattatcaagcagtttatccccattcatacattctttcagacggttcatctgatccagtttcttttcaatgcgggcaaatccctctaccatggtttctatcagtctttcgagtatctcattatctatatatgacataattccaatattataagtgaataaatcgatactcttttcgtgcgcactcaagagtatatactcataatagtgagaataacatgccaaacagataaagaaaataaaagcattttgtatacgtctgttaatcagatatataaattagcatcttgattttctgctgtaaaccgaaagtgtaaaccatttaaagcatggctattaccaagtttacatttctataacgactacttattatactttagaactaatcttataaaagaggtttactaatagctttatatacccctcctactcatttagccttaatatactttacaaaataggctttatatttcatgcatcaaagtatgaaatataaagcctgactttttactgaaaaacagcttaagaatagattagtagttaattttcatcctatttcaatatatttaccagaatcaaatccattctctaaatgcttgttttggaaaatatatcccatctgattggacagtaatttagtaccaccaatctctgagtcaatatttgtatgtgaatgtccatatatccatgcatcaatccggttatcacagatcaaatttccatattcacttgcaaaggcactattcagtacagaacctttatgataaggtgccacaacctgaaaggtaggcaaatgatgtgttacaacaatgatatgtcttgccttactttctatgatacttttccggataaaactgatacaaacttcgtgcatctcattatactcttctgtctggagcaatttcccattatattttatctgtcggaaatcgttcatgcctttccacacgaaatactcatcgctcggattgattcgcgaccatagcgtacttaaaacaaaatcggtatcgtctatacttacgacctgattttgataatatcccacgtttttacgtaacatccatttccattgtaagccacgctccattacatccgaataattgtaatactcatggttaccgggaacaatcaagacttgcctatagttctcagatgcccatttccaaaactttgcccgtggggcaatcttatccttcagatagaatatatcaccggctaataccagaatctcaccagttactggtatctctttctgtttcagaaacatgctattctcctgaaattctaggtgcagatcactcatgtattgtatcttcatcttactgttctcctttccttgattgttcaatctgtttcccgatgattgccttcacctgcgcaaatgagaccggagtgaaatcgttgttgtccactccgacatcatattgtgtaggaagaagcatactcagccgaggtgcatcctttccggtattgttcctactggtatgcacgtgtccgaaaagctgccaggtgccattgtatgagccgccatagcaaaggaacggacaatgattcagataaatcttctgtttatcgacctcgatatacatctgcattgctatatgctcgaagtatctcgtgtaattctgcctcaggttcttgatgtcgtggttgccggaaataaggtatattttcccgtttagcctgttcagtacatttatccattcggcagaacctcccagacagaaatcgcccaagtgaaacacgatatcctccgggccgaccacgcggttccagttggaaatcatcgtttcattcatgtgcgatacatccttgaaaggcctattgcagaacctgatgatattggtgtggttgaagtgagtgtcggatgtaaagaacaccctgtttccgtcaaatttataattcataatctttttattcatgcgcatcactgcgcggttaataatacgttataattctgcctgtggacggaattgacgagaagagcgcatcgtgggaacgtcaccagcaggcacataataaaaaccgtcgaaaagtttggtaaggactttccgacggttttcatttatcatttcaacgggataccagcctcatcgtatccccaatcgtttatcaaacgttagtcggaaaatgtctccaaaagtatagaatgctccaatgcccaaagtatggacatgccccattctctcaaagcattttatgcctcgatctgatacggtgttccaattattcattcttctttgcagcattgtaaactttatatttttattcaattgacggcgcaaaattacgtattttcttgagaaacagcaatttttttagagaaaagccgatatgaagcaaataacggggtccacaatgcatacacatataccttttgtacgcttagccgtgtactgtgagaacttatagcatctccacttagtactaatgtcaggatacaatgcaaccttgataattaaggttgtcttttcacacggtaatatctggtcaaagtaactttattttacccacatattaacatacattaaataaagtaagactaaataaaataaaggggaaaattgattttatcttcctccttgttcagtaaaacgatatatatggattttataacattatatgtggcaatattttgtaaaattataatgtattattcgtatatttgttattaattggagttgcttgcatagctttaattagcttaaaacaagtatatttcatgatatattatgcaaatattgaataaactgttatctttcaattgtttgtcctaataaagaaaatataagtctactgattaataatatataatgatatggccgataaaagaaaaatcgttatagatttaaataatagtctatatgctcatggtttcgaaagtgaacaacagatacacaaagaggatttggataagacaataagcattatccgtaatcaactgcaacagactgatatgcaagaagatcagaatgttttcttgacccatctatatcgtacaatcggaatttttggtgacagaggctcgggtaagacgtcttttatgataagtcttctaaaccaatgtaaaaatgaacttaaagatgatgtggaagtgttgaggatgattgatcctacgttagtggaacataagaagcctattattctttgtgtcatttctatgatacagcagaaagtggaagcagtcctacgttcaaaagaatgttcaaccacagatacatacgaactaaaaagagcatgggacaaggttatgacccagatctcaaggggaatattcgctattgacaatgttggtaatgactataataattcattatggcaggatgaagcatacgtaatgcatacgggattgactaaagtaaacgatgcgaatgagtttgaggctaatttgagaaaaatgacaagaatggcattgaatattcttgacaagaaagcattcattttggcatttgatgatattgatgtagatgtagaacagggatggaatgtgcttgaagcattgaggagatatctatcagacactcggattatctctattgttagcggcaacatcaagctttatggttcattggtacggtatgaattatgcaagaatttgaaaatgcctgatggtactcaccgtgaactaatggccaatgaattggaaagtcaatatatgctaaaactactaaatccctccaacagaataaatctgctttctttgggtcaacttctacaaaattccgaaatcactgtaaacgtaaagacggaaaaggttgttactgaactgagtcagcaatacctgaatattctgaatgatttaggaattattgacatgccttctaaaaatacattcaaagattttctgttatctatgtccttgcgttcgcagattcattttctaaaagatgcttgtatggaaaaggaaaaaaatccaccattagatgtattcagatccagactctatgctcatggcattgatatcgaagcattgaatacgaacatacaaatggtgaatatcgcactattagagtatttgaatgaaaatgcgaatctaccggattgttatttgttgctgcctacattaccggataaagatattaatagtaatttcacggctataaccttgctagagtgttggtatttgaggaaaaatccattccttatatttgactatatgttgcgaattggatacatcagaaatgtcgttttaccttttgaaagtaacgacttagcgataaaaatttgcaaatattcaggttggaatcagttgatgtcattgaaaaacaacataggcttgactatggctaaaggaatggattagtgcggagcaaatggaggaaatctatggtatgagcaaaggtgccagatgctcatttgtacatcgccataaaatcccgtcccgtgttgtttatggcaaagtccaatattcaaaagaccatatcgacatcatcaaaagcggaggtttcgaccaacgggaaatgtattacagcgtaaccgaagcaatggaaaaatatagcctgcgtagggatgatgtctacaattatgcgaggtataacaagatacggaagatgcatcacggaaagtccatgttcctgttgaaagaggattttgacaaggtgatggctgaaaaatccggtatctgagaattattccgcacagacaagaatcattttcagcaatggcagtcatcagcattgtttcattgtattggtttgcaacaaattaatcaccaattataaaaacatatcattatgcacgaatgtaaaactgtaacattgaggacaagacctctaaagaaaaacatgttgtcgttctatctggattattatcccggttatcgcgacaaagaaagtatgaaggtaatccgtcatgaatctttgggtatctacatctacgccgaaccaaagaaccaacgggaacagaactttaatgccgtcatgtcggaaaaagcggaagccatccgatgccgacgttttgaatccatcgtaaatgagcggtacgatttctttgacaagagcaagatgaaaggagattttcttgcctattataagaagacactccgcaggcacgaccagaaatgggagttcgtatatctgcatttcttcaatttcgtgggtggaaaatgttcgttcgaggaaattgatgtggacttatgcaacaagttcagagagtatctgcttaatgcaaaacaacttagacgtcctgagcgtcccatatcacgcaattcggctgtgggctactggtccacattcagaggatttctcaaaatactctatcgcaacaagttgattcactccaatgtaaatgatttcttggagaagatagagccggaagatgtagtgaaagactacctgagcatagatgaactgtacagattggcagaaacaccttgcaagataccggttctgaaaacagcctcgttattctcttgccttacaagtctgagaatcagcgatattctcacttcgcgatgggaagaaatcgtggactttgctgccggaggaaaatgcgtccacaccgtcactcaaaagacaaaaacagaagacatcattcccattagtgacgaagccttgcaattgattggttattctcccgaaaagacagggctggtattcaaaggattgaaaagatgctggacgcaataccccatgaaagagtggattcgagccgcaggtatcaccaaaaacatcaccttccattcatatcgaaggacattcgccactttacaggctgctgccggaacagacatccgaaccatccaaagcatcatggcacacaagagcatcaccacaacccaacgatacatgaaagtggtggatagcaacaagcgaaaagccagcaacaaaatttccttgatccgtaagtattaacggtcatttttgcctcttttatatggttagagtatgattttcgagtatgattcatattctaaccataaattatttgtaaatatcagtccaataaccattagtatttatggttatatggaaattagtgctgaactttacgccataaaacagtaaacaatcacaactatatggagaataatatacaagttcagaaagcagctgatatcagcagtttggctggagtggtcatcgtttcactctcggcactcaccgcatacaatatcggtgaaaagttcaatcacaacatcctgtttgatgccaccatttttattatctctttggtaatgcttattttgacctttgccatattccgcaaagtaatggcagggctttttacaacaatctcaagtaatactacaaataagcaagtacaaagcgaatatccgcaagaaagcaaccatcaaaatgctaatcaagatccagtagaagaggaacagatacctgatagtttggagagatatgagagcattcttgtggaagagcaactgaaggaggtgaaacggaaaagggacaccatgatagctatccgcgaatatgtagtggaaaaaacctcgaaatatctctcaaaagagaatattagcacactattccggaatatagagtgcattgccgaaaaccgggttaacgattgtcagccaatccattcaacgaaagaagcaaagatcagttctccctctttaagacacttagcttggaatatcggtgaacggcttggagtctcccgtcgcgacagagcgatattcattaagtcttctttcccatacgaattgcgcaacgccgatattgaatatctgaaagccaatttgcgcgtcaatgtcccatgcgacattcctattgacgtgccggacaaaggagatttccactttcacaacattacttgaaaattaaatcgtgcagacggtaatcattgttccggctgacagatttctgcaaaatttcattctgttggtttgcagcatattaattctaattattgaaggtatgaacacaacagatttgacttttaacgacctgcccaaagtggtaggcgaactgtgcgagaaaatcgcaggaatggaaaatttacttagggacactcttaaccgccaaagcgaaccaaaagagaatttgcacgtaccaatgacagtgcaggaagcctgtgcctatctgaaaatgccagtctccaccttttattacaagataaagaaggacaacattccgattatcaaacaaggaaagcacctttatatctatcgtgacgagctcgacaaatggctagaggcatctcgcaaaacttcagcacctctcacctatgaggaagaaaacgaagcgatgtatgcctcacaccgtcgcaagcctaatcctaaaaactggtgaatatggaaacggcaacacccattgaggagcttgctcaaatcactacgagatggcaagatactatgctcagtctggaaaaggtgtacgaacaggagccggaagtcctgagtataggcggagtggctatcgggacattgggaaatttcagtgcatccattggcaaggcaaaaagcaaaaagaccttcaacgtgtcggctatggtggcagcagctttgtccggaaaggaagtccttaactacacaacggattttcctgatgggaaaaaccgcatcctttacattgacacagaacagagtcagaatcattgcatgattgtaatgcaacgtatcatgaaactggcagagttgccggctaatgaagattgcgcccgtttctattttctcgctctacgcaagttcaatccgaaggagcgtttggctatcatagacgatgccatcagtcagattgaagggcttggttttgtcgtgattgacggaatccgcgacttggtttatgacatcaattcaccgagtgaagccacatgtgtaatatccaaacttatgcagtggactgacgaataccagattcatcttcacaccattctccatcagaacaaaagtgatgaaaatgcccgtggacacattggcacggaaatcaacaacaaagcggaaacggtcatccaaatcgagaaagacaaggacgacagcaaaatcagcaaagtggaaagtgtgcatacccgctcaaaggacttcctgccattcgctttctacatcaatgaccaatcgcttcccgaacttctgccggactatgtgccgaccaagaaaagtgctggtcgtcccaagcaagaaccattctccccaggtaagaacattcacgaatccacccatcgcaaggttctcgaactggcttttgaggggaaagagactatttcgggatataaagctttggaagaagaactgaccactgcctacgaactggcaggaacaaaattgaatcacaacaagattgtggaaacaattaagtttctcacgaacaaacggatggtggttcaggaaaaccgcggcatttatcgtttcatgcccgattaccactattgactctccacttgactttattctcaaagcgtatattcttgtataagccaaagttaagtacaacgactggtttcatgataattcttgaaactggtcgttgccgtcttatctcccaaacctatctttttaagccaagggcttgcccgttgtacagacattatcttgtatggggagcctaataccccaagcgaccaagcggtcgtttgagagtgccaattttccagcaagctgattggatgaaaaatagcgttatttaagcactttttcttttcaccagcctcttcctcatctttctcgacaaaaagcgaaatttgcacacttaattgcaccctgggcctgctcattatacgacctccattgagttagggtaactcaatattccaagcgataaagcgctcgtgagaagttgtcaatccaaggcaagtagaatatggctttattgcgattatagaataccttaactctccacgcaatcatgttttggttgggctatcctctgtttgatagctggcagggataagcgcatttcaataatgcttttacgaactcttttatgaaccctactggttcttttatgaactcttatgtgaactcttttcctggtgttaggttgatattccagagtaatgtcagccaccataaatgcgatactcgataatgaacacagaactattgtccgaactcttgcctatcagtcgaaacgaatctgccagattctttaggtcgattttgccaacctcagatggttctgttacgaactcaaaaattgccaatcactttggaacagagagtgagagaattgcatttgaacatcctcccactctttattcgtcatttaccaagagacttgaatacttttgcaatacaccgctttttctgttccatatttggatgaacatataaatccaaagttgttgaaatattagaatgccctaacaatacactaacggttttgtagtcacaaccagcttctatacaacgagtggcaaaactatgacgaagcccatggtattttaatttgggaatacccaacttcgccattaatttgccgtaataattacggtaagtacgaggctcggttggatattcatcattagtcaagacatagaaatcttcattgacaaccttttttaatggttttaccattgcaagcagctcctttgtcataggaatttcccgacatgagttttgtgtcttgggagtattgatgaccagttcggtatgtttctccatcccatctataatgtaaatccgttcaattgtacgattaacggtaatcgttccctcagaaacattgatgtcactccacttcaaagcacagacttctcctatgcgaagtcctgtacaaagactgatgtagatacccagtccggtaaaggagaaatggctttgaatatgattgagtattttcttgtgattggcaactgacagtacttccaattctttgtttgttgaagaagacggatatttgatgtcccactcttgataatccatccattcatttttcacaccgaatttcataaccattttcagaacaatcaaaatgtcttttacggatttcacactcagcccattctcaattttccgcaaaacaaagtcttgcacagcctgttcatggagtatctcgctttctccaaaattcggaagaatatgattctccaagatgagcacataagcagccattgtggactgcttcacataaggttgcttgtactctttccatgcaaccgagatttctctaattgttttttgtcccataatcgtatattaatatattgtacatataattagagaataataaatccctgatgttccccatttgagattcacggagtttagtggagagtggaaagaagagctattagataggattgctactttgtcaaagggaataggaatacccaaagaacaactttctgaagatggcgatccatgtatcctatatggcgaattatatactaagtacaaatccgaaatcatcaagcaagttgaaagtaagactgatattgacggttcaaaacttaaaaggagtaaagcaaatgatgtaatcattccttgttctggtgaaaccgctgttgatattgccactgcacgatgtgttccatttgatagtattctattaggaggtgatttgaatgtcattagcttacataaatacgatggcgcatttatgagttatcagttgaatggtaagcgaaaatatgatattgcaagagtagcacaaggcgtatctgttgttcatctatacggagaacatttaaaaacgattaaaacatataatccaactttaccagaacaacaaaaaatagctatattattgtcattgcttgatgagcgcatcgccacccaaaacaaaatcattgaggatttgaaaaagttaaagtgcgcaattattgaaaagttgtactccaaaattcaaggcaaagaatactcgtatggtcaattgtttgatgttgtaaatgagcgcaacaaacaaatggaatattacaatattctttccgcaagtcaagaaaaaggcatggtaaatagagatgacttaaatttagatattcaatttgaacgtagcaatatcaatacctacaaaattgtaagaaaaggtgattatgttattcatttgcgttcatttcaaggagggttcgctttctctgataaattaggcgtgtgtagtcctgcatatacaatattgcgaccaaatagccttttggaatatagttatctgtcctattatttcacttctcaaagatttataaaatctctgattattgtaacctatggtattcgagacggacgctctataaatgttgaagaatggcttaatatgaaggtcgttattccgtcaaaagagcatcaacttcatacactgaatgttcttaaaagaattgacgataaagtagaaaacgaagaaaaatatgcaacttgtttgtctaatcagaagcagtatttgctccgtcagatgtttatatgaacatttggcggagtaaatactctttttgttgaaaaaactttgagcaaagcgatatattgctttctatcaaagattctaaagatgagagaagtttgatgcaacgctccgctgtttgtttgtctggaagtggaaacgacatacgaagaatatcttcactgttaagattggcaattgccccattaccaccttgcagagagttccatatatatctacggtatctattggtttggaatagccactttgtaatagccgttttagaccgatagatgccacaaaaagcaccaacagttataggagatatgcatttcccatcataaaatgatgattttccaaccaaagcagaacttccattcgccatgcaaataataatatccccatcttgtaattgctgctcttgggatatttgtttgttgacagacacgacattgttttggtaatcaagcaaactaccattaacaatattattagagcgcataacaagtgtgctattgtattcaacaacatcatcgctgctgtatgtcaatccacgaatatatgaaccaacatcacccagtcgcaagttattagcattgtttccattcaataccttttcaataattgcgcacctattgaatttatgttccctaatcaagggaattgcacagaatatagtcagcaacaacaaacccaatattcgcttatcagactgcttggattgtagctcttctactctgcaagaaagtgatgtttgtgagactggcatttatccagtgtatggtgcaaatggcatcgttggctaccttgataattataatacagagggtgaagccgtttatattatcaaagatggttctggtgtcggtactgtctcttacgctacaggcaaatgttctgcgacaggaacattgaatactttgcaagctaaagacggatattcacttcaatacctctactatatactgaaagtgttcaattttgagccttataaaacaggaatggctataccacatatatatttcaaggactatggtaaagccaagatattttgcccatcatatactgaacaactccgatatgcacggttgcagtctgcaatagatagcaaactatcggtagaaaagaacattctaacaagcctaagttcgcagaagcaatatttgctccgtcagatgtttatatgaacatttggcgaagcagatattgcttttgctttaatagcttttgtaaaatatctttttcgacattacacttctgctccatagaagaaaagcataaagatacactatgttgtattttctttggaggaataatcacttttagcttttgaaatgtgtcaagtcttaatgacggtacagtagaacctacagcatttctgacgaaatatgaattttgcgtctttagataaaaataaagaaactgagcatttataatttccttgaagtcaaaaatagcataacatctttgatgtaaagcgaattttcctctgaaatatcgtggcatgaattctgctccttcacctggatatattatagcttctttgtcaaacaagaatgtaggtaaatattttatatcctcagacctgtcaaagaaaggatacaaaccatcctttgattctgtaacagcatcttgtacattgctatttccgttagaattactaattcccttgattaaggactgcaacttgtcaatgattttgttttgggtggcgatgcgctcatcaagcaatgacaataatatagctattttttgttgttctggtaaagttggattatatgttttaatcgtttttaaatgttctccgtatagatgaacaacagatacgccttgtgctactcttgcaatatcatattttcgcttaccattcaactgataactcataaatgcgccatcgtatttatgtaagctaatgacattcaaatcacctcctaatagaatactatcaaatggaacacatcgtgcagtggcaatatcaacagcggtttcaccagaacaaggaatgattacatcatttgctttactccttttaagttttgaaccgtcaatatcagtcttactttcaacttgcttgatgatttcggatttgtacttagtatataattcgccatataggatacatggatcgccatcttcagaaagttgttctttgggtattcctattccctttgacaaagtagcaatcctatctaatagctcttctttccactctccactaaactccgtgaatctcaaatggggaacattaaggttcttcgaaccttttatcttctcacactcggcagagcaagcaacctcgttctgctctcgctcaatcgaagatttgaggacctttttatctttattatctattgccatagttatcattcttttgtaggattcaaatcaaatggaagcaatggagtttcatcattaccctcattaaaacgatcaaaatcagatatgtatgatttatcttgaatcagtttatatttttcgtattctctataagccttatctcttgcttcttcttgtgtcactttcccggctgtatcgcacagctcgtaatccatcgttgcaagatattgttgaaggaactttttccaatcatccatggttgaaacaatatgacgtgaagcacgtgattctgccatatcaagaaaggctgttgtaataagatttagctgggacaattcagaatctgacaagtaatttttcgcgacgatggtatcagacttttgcactcttccgtcaggggctttcttccatgtggtaagtcccatataaggttgctcagaatcggcccgctgatagataatttccgcagctgtatgatgggtaacagcaaggtgcatcatattctgtaccatcttgaagaacaactttgtatcttcagatttcgggtcgtaatctgcactacattctgcataaatgtcagttatcttttggtaatatctgcgctctgaagtacgtatctcacgaatacgctcaagcaaatcgtcaaaatagtcctttccgaaatgtttgccttgtttcagcctctcgtcatcaagggcatatcctttaatgataaactctttcagcactgaagttgcccaaatgcggaattgagtagcttgatagctgtttactcgataccccaccgctacaatagcatcgaggttgtagaatagcggcattcgctccacttcccggtctccttctgtttgaactatcccaatttttcggatagttgcctctttggaaagttctcctgtttcgtaaatttgtccgagatgataatttatggttcttacatcaaccccaaacaaatccgccattcttttttgtgacatccagaatgtttcgctgttgaaaatgacttctacccgtgcttctccttgggctgttttatacaataatatattagaacttagcgaattatgcataaattctgccattgagacagattgcgagaaaaagtctcgtgcctgttgaacaagcaactttttgccatcagcattttccgcaataattatacatgccatacgagaaagacggaatatattcaccttgcggaatgaaccgtttccaatccttaccatatcaaccgcttggttgaaatgctcgtccacattcattcctttctctccggctaccttgatggctttgtctatgacccgttggaatttccaataagcagaatagcccattgcaccagaaaggtcacgggaactccagtatttgttcccgttttcatccttgcggcatatattctcaaatgaaggtgtcatctgagatatgttgtcattttcacccattgctattactttctgaactattctacaatgcctaattctttcaggtacacttcaatctctttatcgagttcagcacgtttggcttccaattcctttatttttgccattacagctttaatatcaataggttcttcctcttcaaaggtatcaacataacgaggaatattcaaattgtaatcattctcggctatttcttgaagagaggcaagatgactatacttttctatttccttacggtcacgataggtctcaacaatcttttgaatatgctgttccctaagcttgttttgtgtcttgaccttttcaaactctttgctggcatcaatgaaaaggatattatcatcctccttgcgacatttcttgaatacaagaatacaggtcgggatgctcgtaccatagaaaatattggcaggcaaaccgataatggcatccacatagtttttcttttctatgagaaaacgacggatcactccctctgcatttcctcggaatagtacaccatgcggagcaacacaagccatcgtaccaccttcgttcaagtggtaaatcatgtgcaggataaaagcataatcggctgtcttgcgtggtgcaagtcttcctgccttactgaaacggtcatcggtattgaatttgtcggcagcactccattcggcagagaacggaggatttgctacaacagcatcaaattgggtgtcgccaaaggcatcccattcaagtgtatcaccgttttctatcttgaaattactgaacttaatgccgtgaagcaacatattcattcgagcaagattgtaggttgtcggattcttttcctgtccgtaaatatctactgcattgccaatacttgcagcacgaagcaacaacgagccgctaccgcaagtagggtcatagacattgcgcaaacgctgatgtcctatagagacgatttctgccaagatacggctgacttcctgcggagtatagaattctccggctttctttccggctcctgcagcaaactgtgaaatcatatattcgtaagcatcacccaatatatcaatctcttgcgatgcctctaatccaaaatctatatcgtctaatgcaagaagcacattactaacgagcgtatttttatcatcagctgtcttgcccaatttgggcgaagccaagtcaatatctgagaacaaaccgccaaaatcatcttcgctgtcctgtcccaaagtactgtcctcaatacgcttcaatgagcgttcaagcatgggtaaaatgttttcttttcgcttgatagcttcaattactgacgaaaacaaaaatttgggctcaatgaaataaccgatattctctaggcattggttttgtgcttcctcctgtagttccacagcatcagcatcctccatttcccacaattccttaaaagttatatcatcatctgccaaagcattgttggcgtatttttctattttctccgacaggtatttataaaaaatgaaacctaatgtaaaatacataaagtcgcttgccgacatattgccacgcaaacggtttgcaacttcccaaagctggtcacggagtttctgttgtaaatcttcgctcatattattttttcttatttttcgtaatcaatattgcatcagagatatatactgcaggacaattatatgaattgttagtcaaacactgatgcttaaattttccactggatagatttaaggcaataaccatattccaatatgatgttgggttacattcatattggggatcaagacaaaacacattgaatataccatcttcatcatattcgtatccaatggcaagaacagcatgaccaccgcccgttttaaaatctataccaagaataatggggatattatcatctattgctgtttttactaactcccaaaaatcagtttctctaaaattatcattaatattggaatattcagcagtaacaacctctccataaaccctattgactaatttggtaagccgatcaaaataaaaaccacctcttatcataccatgtttgtcaaaaaattcatggaatagtttttccgtttctggcgacttctttatattatcgtatacatcttcgatctgaactcgacttatcgtcttcaagataagtaaattcatcatcaaagaatatacagcgcatgcaccatcaatatctccttgacgaatatgaactggatgataattgcgtttttttatactacatcctttctctgtaaggtatagactatctataattttaatcattttccatagatttttgctcaaattgtttgcgtaaatcatccaacacctgtccattgtaagaaaagtattttgctccttggtatgctccagatgtatttcgcttttcttctggcataaacgttccaacaaatggtgataacttgtaaatgcgtccttcaaattcaatggaatcatcgctggcaactttaacatcggttcgcgtaggaacaaaagttacaatttcaccaatttttatacctaccatgctgaacttaaaacgtccacgttttacaattcgttttttggtcgctggtgttgatttcttctcagaattaagaatcggtttgttatctttataaacagtgacaacagcatcatctatcatttgagaaatatcataaaatatatccaatgcgacctgaggaggcacattaaaaaattcacgattttgacgaatgcgtaaatccgttaatctgtcaatcgttttatgaacatgtttttcaacgtcattatatttcacagtttgaatggtagcaaaaatctcaaatggaagtggaactgctgtattatccaattcttttgagcgaatatctactggacgagaacttttgccaattttgacccaatcctctcgaaagcttggatttgtcaaaatataaacaaatccagattcattattttttgccatatatgatattaatcccaattaaaagttcttattatattgcgtaatccattcattattctcgccaaagcctttcgggttttgataagaccaagatgtttctctttcaatgccttttgtataatctccggctgctctttttgtaaatagtcatactccttcatgtaatgatgaagcacctccgctgaaatctgttcttcatcagccaaatcattcacggccttattgcgttctgacacaatatattggtttaatcgttcttctaattcgtttgttccgtcagccttattacgatcgttcatgaaattctccttgtcttcatcaacattctttttgataaaaccgtcaatgagtttggctttgccacgcattccggcatccttaatcattgtatcaatgatattctggcgtttttcagaataatcatcactataagggtctaggtcattaattagtgcaagaatgtaagccacattgataatgtcactgtgtaagagctcaagacagaaatcaatatcttccaatccttggttatttccgtatggaacaggatcttccgcaacagttgacggtgcagcaggtgggtcaataaacccgactgtaatatcaagatatttactcttataatcgttaaactgttgttcagtcatgccaaggtcttcagcatcctcgctgtaatcttcgtatatctgtatttctgcatgtttacggataatatcacggaatgcaaacacaaaattcttcttgtcattttcgctttgcagaaagtctatgctgccgggggtaggatatttttgcaggaactctattgctaaagttctgtattcctgttttacttcctcaaacggaggacgtactatatcttcaggattatcagagttgctgaacaatttaatagccgtatcaacattgtttttcaaatctctgaaacaaactattttaccaaaacgtttcttctcgttcaatactcgattggttcggctgaacgcttgcagcaaaccatgatattccatgttcttgtccacatagagcgtattcagctttttactgtcaaagcctgtaaggaacatacccacaacaagacaaagatcaagcgatttcatatccgccttcttctttttcatgcgcagattgatgtcatcatagtaagcacggaagttctccgtggtaaaagatgtgccgaagttttcattataatcgttcataatggcttgcagttcatccgcttcacccacattctcttttgcatactgccctgtacccatgccggtctgttcatcatcctgactattattggctgcgtatgtaaatactgcacctatacggattttaggattcaacgatttgaaaatcttgtaatagcgtataagcataggaacagactgcacggcgaacaatgcgtcaaactctccgtcgaatgtagatttgttaaaattgttaaggataaatttggcgatttcctccatacgagcttgattgtcgttgtcaaccacttcgttgccgtgataatactccacaaggaagccaagcacgttttcatccgcaatggcatccttaatcagatatttatggagacagttgccgaatatctctttggtggtatgtccgtccactgcattttcggtgaaaataggtgttccagtaaaaccgaatatttgggcattgccaaagaacttcattatcttcttatgactatccccaaaatgactgcgatggcactcatcaaatatcatcacgatacgtgagtgacgtatagcatcaatcttgctgctataccacgtcttactaactgccgcattaagtttttgaatagtagtgataataatcttggagttgctttgaagccgtttcactagttcatccgtattatcagtactatctacagcccctggttcaaatgcttcgtattccgattgagtctgggtatcaagatcatgtcggtcaactacaaacatcaccttatccacatcatccaattccgacacaagttgtgcagccttgaatgaggtcaatgtttttccggcacctgttgtatgccaaatataaccgttgtcgttggagttttgcactcgatctaatattttttcaacagcatagaattggtaaggacgaagtaccatcaagcatttgtcgccctcatgaagcacaatatactttcctatgattttgccaagcgtacatttttccaagaagaatacggcaaacttatccaattcattgaacggatgattggcagcatctgtccaggtgaatgtgaacttatacccactatttggattattggcaaaatagcgagtattaacaccgttggatatgacaaacagttggatataatcaaacaatccatgaaacgaagtcttgtgataacgctgtatttggttgtatgcctgtttaagttccacgccacgacgtttcaattcaatctgcacaagtggcaaaccattgattagaatcgtcacatcatagcggcattttttacgtccttccaccgtaatctggttggaaacctgaaattcattctgacaccactgctgcctatttagaaattccacccatatacgctgtccatcagccgtatcaagcggatataagtcacgaagtttctttgccttttcaaagcgagtaccaccttcaaggtatattagaatcttctcaaactcttctgccgtaaactcagtacgtccgtgctcttccaatcgtttgcggttgtgaatctccaactgccgcttgaaattggcataaagattatcttcctcgacaatctgaacatactcgtagtccatttgtcggagtgtggctatcagtccggcttccaatgccgcttcgctttgtgttgacatattcttgccttattatgagtggttactttacttttatattgctattcagtatcttgacatccaatgctttttcaatcttgcacagagtttccaatgacatattctcccgtccttttagaactttggaaatatactgctgcgaacaattcatcttcatagccaacgccttttgagtcataccgagcagctccattcgattcgacatagctgcagctatagcctgcgaatggcaaacccaatcttctcttttgttttccattatattctttacttctcctaaagtgttgtctatcttttcttcagccattgtatgaatcaaaaatacctttgtcctattttgtaggcaaaggtactataaataattgagataacacaactttcaagttgtttgataacattttcggagcaacatagtattcattgttattgtgctctttgtcaaagatgttcttattttctctcaatgacaatgtgtaccataaaatgttggtatgtacttcattatccagattaaattattatagcaacattccgcatgaatatatctgaaataatcatatagaggacagtttacattattgacggtaaaatcccttggtgccttatattccccccttttatcctcaaaacaaactcttgcataacattctatacttcaacgacttttggagcaagacttgcttcatccggtttcagttctgattcatcatgaacctcgattgtctttatatgttcctctatttgaggttctacatagattgttaagacaccatttttttggtaatcctcacatagaaatttccagattaatgaaaacttttttataccatcaactggaatgacactcatatagaaatcacgacaatctttctgaacaaaaaccgagtttttaggtctgtactctaattgatttttatatgtctgataaacttctctttttgcatccctacttgcattaatctgtgcttttgccgcttcatctatgccaaatgcattaaagtagtaaaagttgtcatcaatttccacaatatcctctggtctaaaagagacaattagttttggagttcttatgactgttttacctgtattctcaattcttatacgaagtttgcaccatcttttatctatcttctttggaggattgaacgagaaccttggaatgccgatatttggcacttctaaattgcccaaacttaatctcatcacatcctgttcaatttctgtcaatttcctatactcataatgcttgatagtctttacatattctgggtatattgtgatttcatcctttccgtgaaaagttacaagtacatctgtggtatccttaaactgacaattgttcacgtaccagttataggtcgtcctatatcgctccaattgatcaactatatcctcccacgacgcaatatcgatagcaaagagacctttagccctattctctgtatctttctttctaatgtatccttctatcttggcatctttattcgctgtagtagcaaatactagcaattttaaattaggctcaaaatctaaagcttttgttatttcattatcaatttctgcttctgttaactgtgcatttgtatagtcatccttacctttgcactggatgccacagtaaccactatatttctcaacatacgaaaatacatcaactccatattgattctgtccctgacgaccatgccgttttatagtatcctcacatatccatatctctccccacaataatttgcagagtttttcaaaatcttgccaattgcttggctttttcaattgagtttgagctatcatataaacatcttctgttaaactatattttacccttttattcagaccatcatacaatgtgtacaacaatttttgttaattttatgacaggctattgctttattcatcatcttcatcaagaaaagtccaatctttggaagcatattccttttcaaactctgccaagtcttccttaattcgttcacggaaactctcttcgctgtcatcgccactcatcatccgatctacgtgagttgcatatatttctgctatacgaatttgccgataagcctctgtcattgcatctatcgtctcaactgacagttccaacacatcagcttcatcgggatagcagtcataataacaatgatggattgagtataacaccggaatctgttcgccgtcagaagtgtcagacatatatcgcgttgttgattggaatatcaccccatcaccaaagaattgtcggtctacatatttttgttctgccttaacgatagttgtatctcttagaagaaaagattccgcatcttcataactggcaaaacttatgtagtccttatagctatggtatgagccaaagctatctttctcgtaaatagtccaatagttttcataaaccttttccggctttggctgtaaggctcttgctatatcacgctcaatagtatctgcaatctcacacattgcatatgtgctcctatcaaaatatccgccactcatggttatttcttctttatcaaatgtgaattaagaaattaaatacaatcatattgtttatcaaacactcctgaaaacatatccatttctctcttggaaattcctaatcgtgttgccaattcgcgccatccttttatcgcttcaatcacctctaaaataattttctccgcagtgtttcgattaagcatataatcctcgcaggcatcaagcaagataattaaatctgccttgttggaagttgatgagatgagcagactttgatattcattcagcgttggattcatatcgtatgccggcgacaatgtccatccttttgcagtcaaaagaaaaccgtgattgcggaaatggtcatcagtattgccgatacaaatattgaaagccacacgacggtatagttcctgcaggtttcgctctacatcggtacagctctgaataataaagtcgactatatccagataaccatgcccggtagttgcattatctccatcacttaatcccaataaggtcatagcagatgcaaaatgaatacgtttgctatcgtttgttctatcgaaacgttgtgacagcaatgtatgatatttttctccagttgccagcactttggtttttgctacgtttactcctgcttttgtagcaagcaagtgactgaaatgctcccaaagtcctacattatagtcatccttgcgagacgggaactttgccacgtaaaggtttttatctgtatcaatcacattggctttaggtcttgcacctcctaatgatgtcccaggttgcacaagttgtgcaatccatttcttatcggggagcatattgttttcttcgcttttctcaatctcagcactggctgaaatcaactcccgaatatctgtcagaggtggaattttcaacgattcactcacattgataaattcaccatcgggatcttccttaaaacggaatccacccattcgggagaaatcatcgataccagttaagaaatcgaaagatgataatctccgtaccggtcgtttttcttccgccgctgtaatttgctcacgacgcaacaacaaagtacgtccccaacgatccggcaaagcatcggaaaaacatccgaatatatccttgtccggttgtgtatattgttgtcccgggtaattagttaggtcgtcgctcaaaaacagatcgctgtgctgccttaaccattcattattgaacgtaaaactatagctgtccgcaccacgaagagactcatagcccaattcgcctatgagttccacttctttgagccaatcgaaatcggcatatacatacaactttttcatagattattctttcttggatgcacgttctcttgttttcaaactcaaatcttgcaaagcttttcccattttatcttctttggcaagcaataaaatatcatcgtcaagttgcaatgcatacaaaacacgtagatagatccctattgcaacagtaggaatccctttttctattcgggacacagtaagcgatgaacaggttgcccgttctgccacctgagccacactcagattccgacgcaagcgagctaacttaatctgctcacctacaatttgcatcttctgctccaattttcggggaagcttggttcccattgtattctttgtcattactacatcaatttaaggtgcaaagcgactataccgatgacttcactatattcaacctatcatataatatacaaaagtaatactttttatttatttaatgatgtattacacatagaaaaatgcacatcttggcataattaaccatatacctaatctattttgagcaaaaacttccaaaaactaaatgctataatgttgtttgtaagcatcatgtacacctatcaacaaacaatgtaaattgttcatcatacactcatcatatcaaagaactattttgcttaccaaaagaaaaagatatgactccacgcttaacttgactttaatgaccgttattatatacacgggcaataaagttaagtcaaatagagggagagaagaaaattagcttacttactggtattattttcttttcgccagcaatcaatatcagtcactccgtgttcaatcttggaggagcaactagcaatatagacacaggcataacatcagatgaaatgctatgcaaaatcttccgtaaacctcatagcacggctggcaaatttgcacccaaaaaccaccttttttatcaaagtcttttcatttgttttccttgtaccggaaaaacgcattatctttgcaaaagttcagcgaagaataaagagcaaaatcagactttcctaccgtttaagtttcaaactattggtagtcaatcagtctaatatgttgcatcggaaagtaaaagtaagtgtaatttcttgaatatcaaaatgtgcggtacaaaaacttgtgaaaaatgccgatttttgatgagaaaaggtacaaaaatggctctgaaacaaggggggggacattatgattattttgcgaaatattctgtcttcaaccaataggcataaatcgggtcctggaacgagttttcaccggccttattatccaatatgtcattcttgataaggactgcctttgagcgggatattgaggtcgttgaagagatttgatagcgatgcatcactttagtcgaactgatggctttttctccggttataagagccttgaggcagttcaagttgctgtgtggtcagtttgtcggtgattgttataaacaacagacttatgtgacagcggtcgctatttaaaaaaatagcctaagtagcaatattctgaacagaaaaggaagtgttatttctttttctgtttaaattattgctatatttgcagtatggatagaaaattaactgaaataggaaccattccagtaacgacttcaatcattgaatcgttgtatccggaacttaagtctgctgacaagaaagtaacctggctcgaaaagcaagggattatcatcagattgaagcggggactttatgtgatcaaccccgaatattcaggaaagaccctatcgagtgagttgatagccaatcatctctatacaccttcgtatatttcaatgtctactgcactacgatattatggacttatccccgaggctgtatatgttcatcaatcaatgacggtaaagcattcgcgtagctttcaaactccggtcggctgttatgactacaaacatatctcaaaaatagcatttccaataggagtaaggagtatgtataaggataattatgcttttcttattgcatcaccggaaaaggctttgtgtgatttgattgccaattcctcgcaggtcaatcttcgctatatgaaagatgtggaaacatatcttgaacaggatattcgtatggatatggatgagttcaataagatggataaaaccatattcgaagactacataaaagttggcaaaaaggccgattcaatttcgacacttttaaaattcttaagacgatgaaaaatgaaatattcgacaatatgctctcccgttatgatttaacaacagagcaacagaagagaaacgctatatttgaagtgaaccaacaagtgatacttgctggcttgtatgccggaggcttttttgagtcggcggctttctatggtggaacttgcttgagaatctttcatggcttacagcgtttcagtgaggatatggatttttcattgcttacgcaagatgataagttcgattttacgaaatactttcctgctatcgttgatgcttttacaatggtaggccgtgaggttgaaataaagaaaaaagacaagaggaatttcggaaaggtcgaatcggcatttcttaaagataataccgatgtgtatgatgtgactttccaaacagagaaatctataaagataaagatagaagtagatacttgcccaccgttgaacttcaagacggaacagaagctattgcttcagccatattcatttatgacccgttgttttacacttcccgacttgtttgcaggcaagatgcacgccttagtatatcgtgcgtggaagaacagagtaaaaggtcgtgattggtacgactttgaatggtatgtacgccataatattccacttgattttgctcatttggcagaacgatgcaagcagttcaacaatgagaatatcactccagagttattcaaggagaaactcattgagcgtctctcttcagctgatataaaacaagtgaaagaagatgtattgcctttcgtgcgcaatccaaaagaacttgatatttggtcaaatgattatttcgtgcagttggccgggatggtaagaatagaataatacaacattaagctttctccaagaaataactactaaagtatttatagctttagtaagcctgcaccttttcttattggcgaagtcaatccaagtaaggttatacttattcatagtcttattattttgcaaagaactcagtcttcaaccaataggcataaatcgggtcttggaacgagatttcaccggctttattatccaatatatcattcttgataaggactgcctttgaacggaatattgaggttgttgaagagatttgatagcgatgcatcacttcggtcgagctgatggccttttcgccggcaataagagctttgaaatagttcaattgctgtgtgtggtcagtgtttcggtgattgttacaaacaacagacctatgtgacagcggtcgctatttttcaagattacctaagtagtaatattatgtacagaaaaggaagtattatttctttttctgttcaaattattgctttctttctataaataatatattgtttgttatctgtaaaatatcagccttatgaataatataatagcatttaatatctccaacgcccaataatatgaccaaagcagatttcaacaggaataaattcaaaaatttatctccgtaacacatcataaaataaagtaaaactactatatttgcatattatatgatatattgagctatgacaaaaagtacaatgggtaccaagttgccaagaaagctggagcagaagatgcagatagtaggagaacagatcaggctggccagattacgcagaaatctcagtattgcccaagttgccgaacgtgccacctgttcacctcttacggtttcacgtatagagaaaggtgtaccgacagtggcaataggtatttatctcagggtgctttatgcgcttcaactagatgatgatatccttctgcttgcaaaagaagatacaatggggaaggccttgcaggatttgagtcttaagaaacgagaaagagcatccaaaaaagaataaggtatgaaaagagtttatgtatttgcagattttgattggctgaaagcaccaaggttgattggagagatgagttacgaatcccttcgtggctttgctagctggtgctgcaaaagttgaattaggtaaaaatgaaataaaatatttttaagagtattcaaaattttatttagggtattaataatatcgagagtatgaattatacagcttggagtgaacttatatacaaatattattttgaaagacactcagatgctagagttgtacttcatattactttgcaagatcttgttgattttgcaaaagaagaaaatgtggagattgcaaaaggtcgatatgcctctgaatttaaggacgattttatcaaaagggattttgtttgtaaattttggattaatataaaagataggtgccctagtatagaggactttaaagaaaaactattagctcttaaacatatggcaaaggaagaacataattataaatatcttcttcctattattgctattttaattatgccaatttgtgaaaacgatgcgcttgaattgcatgggaatgattattatggccatcttttaccatttctatttagtaatgggttcataaataaaaaagcaaataatgatgggaatcttttgcaagatattgctttagatgaaatttggaattgcattaataagtgggctgagtcagaatctctagcttttaaatcaagccaagttgtttcgggtaatggaaggagacattatgtacggtccctgatgaaagagagtctgctatcaccgtctcaccttcaaaaattttgtatcatatttgaaaaaggaggtcttgcccctaaagttaacattgaaaatgatagattgttatcagcctttcgtacgaattatcaatacattggattatcaattggaagatataatcagctagtaggtaaagagttcaaagagtatcttatatctgttctacgcaaagaatacgatcattgggatggtacaacgaaaataaaagagagggatcccaatacgggaagaataaagattaaatcagataacacgtattatcctctattattaatgatggattttgatgtaaattctcgagtagtaaaatttggatttcatctatattgtcctgatattgatgatatggatgatatgcattttattgcggataattcagaagtagatttacctttaatttatatcaaaagtgatggatatgctaatcgtccattttatattgaaaataatatagtcaatagaatttttaaggatagaaatggtgtatatgagatacatgaagagaatttagaaacaattaaaggtcgattcgttgtttctgattactatcttctcagagtctatcaaaataaatatattgcaacgaatgaatttatcaagggtaagttttactttattgttgtaagaaaagatgtaatagaattatttacggaatggctcaaaggaaattccgctgaatttgtttctgattgtatattaggcggtaactattgcctgtataggataaattgcgctattatggaaatgccacagcgtaataatttgcgttttaattcagatttgaaatgcaaatccgtgaataatatcgaagtaaagacggcagaaaatcaggaggttatattattatctaatttattccctgcacattttgaaatttcaggtgttgatgtagcaaaagataaaatatatgcagtttctgtgaatagtgaaaataggtactcacaagagttgatttatgatcagaagaaaagtgtctggatattatctgtaagtataaatacagagtttgtactatattgtaatgaaagtcgtataccttatggacatacatataaattttcagattttattcttccgaaaagttttaaagaagtaaaattggataaatggggcaaaacaaatggaaaactattttcattgggactaacactccctgatgaagttgctaataagaatttgattaactggtctttgttaaaggagcaaatggaagatgctccgataaagactattgtaaataatacatataaagaaacagattatcttctctatgcaattacatcggcttcttatcaaacagatagttggctgatgaatatgaaatggattaaatccattcgggaccgtattgtttcagaattggaagataaagggaaagaatctcaacctgatagatttgcactaaaaaatttgcttgcagattatttccgaatgggatatataaattatgcatatacagaaaatggattgtgtataacggcaaatcaccctactttaatattacttgtcccagaatataagagagagattttgccaggcgcagatggaaggaatattgtacgtcgcaaatgtattgaaaggaaatataaatgcctgttgtctggtggtagaaccatatcccttattaaagagatagaaaggtatcaattacaatatcaatatgaattagaaataaaatgtgaggacaatagtttgatgcctcaaaccatttatctttatgcggaggaaagagattcgtttaaaaagttagcagagaagttaaatcttaagtatcaagataatatctattctaatgcattgcttgaaacattgccctcagttgaagagtatattgaagaaataacttctaatggtgtagaaagagatttgtttatggttaaaagctttcgtgcaatagattataaaagaatggctgaattgtatcctgaaaaattgaaattgggtaggtatctgtctaatgcggagatagataaaagaaactttgacaaaaataaggattttgtaattttctttccgggtactaaagatgaagtttctgtattgattcatgatgggcaaatgaaagaagttgataaatactggggacattttatcggaatgaggtatgcagatgcgaaagttcttatttatgataaagaacgggcacaaattagtatgcctcaacagttaagattacctttactttatgctagagcattgacaatgttgacaggacaaactcctgagtcaactttgggtagtcgggcttataatattggcgtaaatccttgtacagatgcaagtgcaagtagtccggatacaatcttaaaaaaattaggacaaatttaaattatgatgtattatggcaaaatatcttattgatccaatatatgcgtataaggagataaaggataattttatcctttatgtaaagaccgcatttggaacacgatataaaagtattgaagaagaacgtgaagagttattacgaacagatcaagttgcggctcgtgagccttggatagaaccattacctgcttataagaatgttgaattggataatggtgaaaagctgcgtatttcatcgttaagaaagcaggatctcccaacgatgaatcaagagtcatcttctatatttaaggaatttattcttaaaggattaataaaaggggattacccgatatatcagcatcaagcagaaatgttgcgtaaagcattggaaggaaaaaattgtgttatcacctctggtaccggttccggtaaaacagaatcgttcttactacctatgcttgcgagcattattcaagaagcggagaatgaatggaaacagcctgttgcatatactccaaaccgatggtggaatgcgaatgatggcaatccgttgcttatgcaggatatatttgaattcccgcaaggagcagaacaaggaactcccggatatttagcatcttctgctatgcagcgtcctaatgaaaaacgagatgcggctgtcagagcccttataatatatcctatgaatgcattggtagaagatcaaatgactcgtctgcgtgatgctttggataatgatgaagtacaaaagtggatgacagagcgtttgcacggaaatcgcatcttttttggacgttataatggtgctacgccaacgcctggttatccaaagtttggagaaacagataggaatcgtcgaatctatcaaagtttgttgtcttctatgaatgcattagacaaaatgacagacgatacattaaaacttcttgattctaatttatctgaagaacaacaaagaaaaaataaaaagaaatatgaggtaagacgcaccatttcacaaatgatatgtggcaaggatggcattgcttcatcagaaatgcgttcacgattcgacatgcaacagacacctcccgatattctgattaccaattattctatgttggcaatgatgttgatgcgagaggtggacaatccaattatagaaaagactcgacagtggttggcaaaaagttcatcacatatttttcatcttgttattgatgagttgcatttaaatcgtggtacttcaggtacagaaaccgcctatcttattcgcttgttgcttaatcgactcggtctatcaccagatagccctcagttaagaattcttgcgtcttcagcatctcttgaagtcactggcacaaagagaaatgaaagtttgaaatttttaaaggacttctttggaaccgagtttactgcagataatgttgttgaagggcattatatgcaaactgtacaaagttataacagtgttcttccaacagagccatttgttagaatttatgatttgttttacgagaacccctcgtgttttgaagagtatcagactaaggctgaaattaaaaatcgtgtagatgaggtttgttctaacgtagctttatcattagcaacctatgcacattgtgaattgcctgatactgatggattggcacagttgctccatgtctttgcatccgatgaattgtccatagctaaacgtttgtcagacacctttgatttaaaagaactggggcataacagggccattccattttctaaagggaaaggtgaaccagaatctgcaaatgcgttaggacggtattttgtagactatctttttggtaatatgaaggatgaatctgtgaaggccgccgaaggtttagtaataattcgggggttatatgatatatttgataaggtagattgtggacctatgcagcgttttcgtttccatttattctatcgaaacatagatggattatgggctacgcttgagaagtatgatgaggagaaagggaggccggtaggtaagcttcatgcccattcttatgagatagatggagacaagcgtgtgttggagttgctttactgcgaacaatgtggtacattgttttatggaggcaaacgacatgcttatagagaacaaggtatgtggaagacagatatattgccgactagttctaatctagaagatttacctgagcgacagagccaggttatggtagagaaacgaaattatcacgaatttgcaattttctatccagtaccgtcaagtattcgtgatgttgatagaatgttacaagaagtcggtgtcggtttacaacataaaataagttttaatgaaaatcgagaaaacttaagttgtcactggcaacttgctttcttggatgaaaaaacgggacacgttactatcgctcaagatggagaacaacattccggcatcagaggctttttatatactgtggaagctttggatggagaacaaaatattgatgcaactatcaaagctcctgcattaccttgccattgtccacattgcgctacagacagatttggaaggtcattccgctcacctcttagaggattccgaactggtttcaataaagtcactcagttatatgctcgcgaattgttctaccagttgcctactgcacataatcgtaagcttgtgacatttgctgatagtcgtcaagatgctgctgttgtagctaatagcattgagcgtaatcaatatacagatttaatgcgcgatatcattgtagaagaatgtacacttgatccaagtatagattatgaagcaaaacgaaattatcttgatgaacttttgactgataagaatgaggctaaaacaacacttgataatcctaatgcaacatcacgcgagatacgtagtgctcaacgtacacttaataccatagacgacgagattgccgaggtaaaaaacattttggaaaaaactattcctgtagaacaattaataaatacgaataattgcattgattcgcctatttataaagcttttagagaattatatacaaatcctgctggttgcaactctgcgaatcagcattttgaggaaacaccgaccgctagtccggtaatgtggtatgagatagataacaatgcatctccattgttgaaacaagatgttaatagaaaagttggaagtgccattattcaaaatgttatgcatgtgctattcggacgtttgcattataatgctgaaagtgctggtattggatgggttactgtaccaagggatgaaaataggattcatggtatacttactaattcaggtttagctgatatttcatcggatgtatttatggaaatagtcaattctgttattcgattaattggtaattcataccgatatacaaataacccttatgatatatttcctacagacagtgatgcgaattttcaaaatttgaaagcgaaatctcctattagaaggtatatttattcgtgttgtgataagtatcgaataccatatgtaagacagaatggaaggcaaacaaaggttcccaacatactggggcaagctgttctggattatcttgccttaacaggcaatcaacaaatgtttttgcaacctcatgcattattgattcgtggagttttgccaaatgaaattggttatatttgctctaagtgtggtcgtgtacatctaaataaatcggcaggaatttgtatcggttgttttcaacatttggatgaaatacataccattactattgatgaactgcgcaggcaaacggacttaatgattaatattgttaaacatcgtcctgcttgtagattacatagtgaggaactttcagggcagaccgataatcaaagtgaacgtcagatggaatttcgcgatattgtaagaatcgatcaaaattctgctcatgcagaatacatagaaaaagttcgttctattgatgtcttgagtgtaaccactaccatggaggttggggttgatatcggtccattacagggtgttatgttaacaaatatgcctcctcagcgatttaattatcaacaaagagtaggacgaggaggtcgtcgaggacaggcttactctatgattttgaccctatgtcgaggtcgcagtcatgatgaacattatttcctaaaccctcatcagataactggtgatcaacctcctactccttttttgtcgatgaatcagttagagattctgcaaaggttatatgcaaaggaagtgttgtattatgcgttcaagtcttattccgatgagtctaatgtccgcttagatggcaacactcatggcgaatttggtacacggcaaggatggatagataatgtaggggccataaaagattatgtgcaaagttggttatgtaatacaacaaatttagataagctgtaccatatagccactttgttaaccaatgacaagaatcttgtttcaaagttagttcaatatgtatctgatattactaataaaaatcgcttgataatgcaaatggatcgaactgtaacagaccaatctattgttgctgatatgcttgcggaatgtttggctgaaggtggtgtattgccaatgtatggaatgccgacacgagatcgactcttatatcatagtttgcaatatactgaaggaaatgtggtaaaagaagaaattgcttcagtttcacgtccaatagatcaagctattacagcttttgcccctggcgcttctatcacaaaggataaacatattcttacatctattggtttttctcaatcatcaatagtgtatggaataggaatcaatggtcaagggtgtatcaagacaaaaggtaatgcaaatgctcctatatttcctttaaggatgacattatgggaatgtagcaatcctagctgcaagtgtattgtaacagacaatcgtaatccaaatactcaaggtgtagtctgcgattactgcatgtcaccaatgacttccaaaacgatttgtacacctgcatcatttattacaagtctttcgaaaggttttgatcaaaaagatgattctgaaattatagtaaagcgtaatggtatttgcatggagaattcagaacgtcctatagttaaagtctttgatgatatgaatgtctctctttcgttatttagaaacggtaaaacgtggcgaataagtgataaggaaattgaaggtcgtgaatgtagtgtaagctataatttgaacggaactaggattcggtctttggcaaaacaatggattgcaaatcccatttataatggtacggatagtcctaatatattaaatggcaatgtaacgctattacctcctgatgacaaagatgttaaaacatatattacaccattgggtaataggttggaaacgattcatttggcagcacaaaaaataacgaatgtgataacattgtctcctgcaaatagggtggaaggattgattcttgaacctttccattgtgttaataatagattggattttagaacacaaggggtaagagctgcatattatactttatcattcctcatccagagagcaatagcatcaaaacttgatatagacccaaccgaaatagacgttgttgaggttctttcaaagacaggaaatttgggtgaagtgtgtcttgctgatgaaaagataaacggttcaggttttgtcgctgatttctgtttgaatttccttgattatagagacagaatactgaatggaatggatttgtattttaagcagatgttaagcgatgaacatattaaagaatgtgattcttcatgttataaatgtttgaaatcttataaaaacatgccttatcatggtttacttgattggcgtttgggtattgctctgtttcgtgtaatgtgtgataataattataaggcaggtgcagatggtaaattcaatacaccagaattaaagggctggtctgagttggcagagacattattgaagtcgctaaatgaaggattttatagtactaatccatatcaaatagctaaaacaaataatgggataccatatatgtatgatacagaagggaaaaggaagccagtttttgcttcgcatccgctatgggagggtgttgcagagacccaaatacttgctgatgcagtttttgaagcatctcttatttgtaatgcaaaatgggatagttcaaatgttataacaattgacacatttaatttgcttcggagaataagtaattgttacgagtatattcaaatacaacaaaatatctgatatgagatttatcaagataccacatattgatgatacttgggacaaagttcatattaagactttgtcttcaagctctttctcatggatttgtaatggatgtgcatatcaggttcttcttcaaaaggtattatatacattaggtgataatacttattttttgcctcctcacaaaaatacgattcttggaacaatcatacataaaatttatgaattagcctcaaaaggcacattatctactccaagagaaatgatggaaatatgggagcaacttgttaatgagcagaaaaaaaaactaattgaaagttatcctactttattaaatcctaaaattaatgattacgataaaagaaataaagctataagatatgcaattactatacacgagaaaaaaacagattttttattagaatctacaaatatcaagatagtttcggaaaagccaattgtttgtgaggatataggactctcaggagttgtagacaagatgataattgattctggaaatatcgatattatcgattacaagtctggtcgggtggtagatgaagatggtaatctgaagttggaatatattgttcaattgcatctttatgctgctatgtgtgtacatctgtccttaggaaatatacggtcattgaaactaatagatattgaaggacagctttttgatatagtttatgatgaggaattaagcaaagctcttgtaaaagacgttgcagaaagaattgttaaattaaacaatgcaataaatgcacgtcaatttgaagatttaataaaaccggataaagataggtgtggctattgctcttgcaggcatatttgtaattatatgattcaatcggacgaattgatatacagaacaatatgtggttatgttaagaggatctctagttcaaatatgtatattttacaaaatggggatatcacatattatatttctggaattgatgtgtatccaattgatgattattatggttatattgggaaaaaattggtatttattaatgtgatccgtacttcttcattagcaaataattacacctataaagtaattgaaaatacattagtttatgaattataacacaataaatataaaaaaagaaagaatacctattatttcttttttttcaggtgggggatttatggatatgggttttataagtgctgggtttgatgtcgtatttgcaaatgaatatgataaagtgtttgcacaactgcatgatgaaggcttattttcatgggcaaaagctcataaggaaagattctgtccaattagtacaactgaatctttaacagatttatctcctaaagctataattgatatggcttttcccaatggtgttccaaatttatggggtataattggaggacctccttgtcaagattttacaatgaatggaaatggaaaaggctttaatggtgaacgtgggaaaatgacacaagttttctataatagaatacgtaagatgaaaccttcgttctttgttatggaaaatgtggtaggattacttatgcgcaaagagcagaaaagaatactagatactttattgttaaatagtatttgtgatgattattatattgatagacaaatattgaatgcgctttattacggagtacctcaatatagaaaaagggtgttcataattggaattcgtaaagactgcttcactccattggttacacgtacaccatctattgataatgtaacatcaatagattttccttggccaaaagctaaatttccaaatgcagaaaaagaatatgactggccttcaatgattccttatggcacaataaatgtgataaagccagaaagcataccatacgaactctgtgtccaaagctgtttagataatgcggtaaatatgcctaatggaatagaatattttgaacttattaaaaattcagaaaagagaaaggaaatttacgaaggggatacaaaacgcagatcatttaaaagattacatcgttatcgttatagtccaacaacatgttttggtaataatgaaatctttcttcatccatataataataggagattatctgttcgtgaagcattaagaatacaaggtgtagatgataaatattgttttggtcctggacgactttcagcaaagttcaaaattattagcaatggcgttcctactcctttagcgaaggtcgtagcaaactcgctatatgattttttatatgatttacagagaaataaatagtctagcttagatactattttttaatagttatatttttagctcctttaacggcaacccataattatattgtctgaaaaatcctctgtggataagtttcagaccaagggtctgataatacttgtagtcatcatcctcggtgcagaggtatttgtaaccatagcgcggagcgtattccttgaagaatctggcaaggtctttcaggttttcctgctggtttcgtttgaagttgcttcgcactatgataatgctccagtcggggatactgccgacaccacaactgtattcccaaaaacggatgtataaatccatttcgcctacatggacagaaacacaaatgccgttggcgttgtgcatgacggaacagcagtttctgtaaccgaatctctcacacaaatagagattgaaatcgtaaataaaatcggaatagttcataataatttgaattttgatggttaataaaaaattgattatagactgaaacctcgcttacgtttcggtttctttttcttctttttaagccggttggcctgtattgcttcctccgtatcataatccgtaggagagggtgtgaacaatcccacactgatgcctgaatgattctcctgctggtattcatgccgaggttcctcgcgtatggttgctgcctgtacctgacgctggttcatggtagcggaaagagcgttatatctcagctcttggtcgatgttcagaaaactgaactggcggtcaatcttggaaccgctaaaggtcagttggtcacatgtgaacttgacaccttgcatctctccggtcgtgcgacttagcttccattgcgtatcaattccgtacttccgtaaggccagtctcagttcactccagcttcgggcgttcggaacttctcgtttcaaggcatgatagataaaatactttaccttgtcatgatgacgtaaccgcatgaaattgacatgctcttttccttcggcaaaatgcaagcggtaacgggctgttagcatcttgcagaccttttcattccggtaacggtcgttcttgtcgctgatggtgcggccgtcattatccacccggttgtaaacgatatgacaatgtggatgatcacggtcggtatgccgggcgataatgaactgcgtgttctcgattcccatcagcttcatatagtcgtgggcgattcttagcatcagtccatcatcgtcacggatgcggtctccgtcttctgcggagaaactcaatgatatatggccgaccgtgttcttgaccttgtcgttcagtaaagtctgcaactcgaattgttctgctatttcttcaggtgaaccgtagacaccaactgctttcagcagacgcgatttatcttctttcagcacatagtttacgcacccggaaaacgatgtgcccttgacaattttaccgatcatctttgaactgttttatgagttgtgaaatctgttgaacagcggtactgcactcatcagccacacgataaaaaccgtaagcattggctcgtctggcaagctggttcagatttgtgctttcgccaatcagttttcggatgatgtcaagattttctcttgtaattcgttcacgcactgtaccgtgttcgataagtgaacgcactacttcgctttgactgcgtttgctgcgtcggctgagtgctctgagccagccgaattgttcgtctgtaagacggattgtgactgtatttttcttgtccataatatttgcttttgagattaataattgtgaccatcgggagccgtctcaccttcttttgaggtgagcaagtggccgggaaatgtaatacaccggcataaacttgctccagtgaaaaagaagtgaatccaccatctgacaatcatcgtttgaaaagtcctttccgagtatgttgaaccgttgctgaaagcggtgctttctccacattgacgagctgcaaatcgaaggtttcgaccaacgttttcaaggccggattcaacgtgataagacgattaaaaatagcttcctttgtctcttctctcagcagaaaatcggcgatgtcataacccgcatcccgttcttcttttgttgcgtttctttccatgaaatcgaagagagaaacctctattcccaggttccggatcatctccattttactgttccaatagtcggtcgcacccaggtcgggaaaaagtagaacacgtcggtttctcaatacgctcatggcatcccgattaaacgctccgttctttccgcccgaagcaatccagaggtattgcggcagatagaagctggatatcaaagcgcttttctcactctccacaagggcaaccggacgctgctggtcagaggacaaaaggtgctcaccaaacaggcattgccggaggttgaaattctctttcttcaaaatggaatgcacccacgtgatgtagttgtgcggctctttaatccttctcccgttctcaggattgtagagcatcacttttccggtgcgtacccgtccggaaatatcgacttgccaaaagaccgtagctcccggccaatgcttcgaggttcctacatggtagcgcaacatcagctcttcggtagcctcctgtccgaaatggaaactcaggaattgaaacagcttgttcgtgcgatacagctttagggactgcctcatgatttccgactcaatgaatgacggttcagtaggcagactgatgcgtggctttgacaccggtacaaactcttcgctcaatcgttccttggctatcgggttctcgtcaaagtacattttgggcgtatagttgtagccgcacttctgttcatggttgcatcgccctacataatcaggaaagctgatttgcttctccgtatcgatgtatttggcgaaacaacttttgcggtggcagttcgggcatgtgtgccgggtgctgacacctttgtatggttctaatgtgaatctgtagctcatttttctttctgtttggatgttactatgcacattttcgcaacttcacaaacccctcggttgcgaaaatgtgcatagtaacaggtttatttactgtattctccatgattctcttttctgaataatgttccgatgtggcgttttagaaacatcttgaaagcatgttccttcatcccgtaactttcagcaatgccgataccttctgccgtcgtaaatctctgaggcaggttcaggtagatgttgcggtgcaattcgctcaactgttcctgactgacggcggtctgcacctttacggctgtagtccgaaaatattcagtcagcaggatggcacggttcacgctttcaaggtcaattgtagttttatcacactctccgcaagtccatcgggcaagctggataatcagacaaaaccggataatgtagatttccagtttgcagtaaatacctaccaaagcatcattggtttccatatcacattggcgggcattttcatgctgccaaccgtaaagtcgttgcttggcatcttcatcgaatggcaggcattgaggctgcaactcattattctcgtcatgcggacaatcttgtgcgatcagcttgtcgataatctgttgccactggatttccagttcttcaggcgtttcccggtcgttccatctgcttttcaaaacagattcaggcatcacgaaaagaatacgatcgataaaaccgttactcgaacgctcgcccttgaccagttcacccaaaatcttcttttggattgtaccgataacggagatatagggacggctgataaaaatggaactttgcgtactcttgcggtcggaaatcgtaggcttggcattgaacactgaaagccagaattgttcttccgaaccgttattatagcggttgaaattcttggaccaggccgacagctcgtccgaccaaaggcagagtcctctgggattctgggcatgtatcaggctcaatccttcgggagtgatgtctgaaacaagaaagcgtctgcgcacgggagcctgcggaaactcatccaaaccggcttccatgcgttcctttttgctcatggacatagtgcgttcatactcggcatacaacttctgatactcctgattctgacaatagtcgtgctcaatgaacggctggaaagcaaaactcagcggatgactcttattcgctccggggcgaccaatcaatgccatgtacagaatgggactttccagccagttgcgctttacctgcaccaaatgggagttgccaatccccacggcaatggccgcaaggatagccgcagcaacataatccacgggatagccctgacaatcgtgcaaactgctgatgatacgctgaatcctgataggaaagacctctattgggaattcaccgccggacatcttggctccgatgcgcacagcctcgccgataataccttctgctgttaatttggaggttgccatagtcgcacagatcaaaagttataacctccctttggtttacgctttgctccatgtactatttgcgcggcttgttcctggagcgacattgcctgcatctgcttgcgtccggactcaatccattgtagtaactcatcttcatagaagtagagtttctttccttttttataggctggaatctgtcctttacgcgcaagcgtgtaaatggtaggctttgcctttcgtgtgattttacaggcttcgtcaatttcaataagacgatgcttgtctgaagatgtctgcggttgcagtgccgctaccatttgacggatttgttccatctgttctgtgagataacctaccgcctgcggcagcttatcaaaagtgatttgttcgtttgccatacgtactcgtttttaattgttcgctggcaaaggaaatcggtgttttgatggtgggaaacatcacaggaatataactgtgagataacttttagaggtgattaatgctaataaatggttgataattagctcgtattatgtattggattatgttgttatacttgttattgggaattattgaggagaaaaaagaattacttgtgatttaaatataaaatagaaatgctaatattctgtatgataagtttttttgtaattttgcatagtaaattcattataaaatgctccctgtagaaaaattgttgatttcaccatgtttccttttaggaatcctattatttatcgctttctttggctggttattttcagttagattatttaaaccatccgataagttttggcgaacatcaaatttcgtcggtttactttttacttgtttgggtatctttggcgtcattaaagatagccgacagattttttatgagagagagtattatcaaaataaacttcgaatagaaggttattatagatggaggctcatatcaaatctaaatgaagacatttattgtcgagaatttattgagacagagtatagtccaagaaatttgagtactatgcaagaagactacaataaaacttgtcaatggataaaagataataaaaggtatttttttgaatgttattctaaacaagaaccaattattatagattctataatcaatcccaaaatgcaagtctcagaccacattttagaacagtattttaaagatatgcagctgtgtatagctgaatataatgatgatattgcaaaattaagagaatacgaacaagggcagcaaccaaatatatttgaattgctttatacaatcttttcaccgtttttccttgcaattggtttagggtgggagtttgtgaaattctttgctaaacgctgagtcctttattggttattcatttacgtaatctccttctttaattttatataacatgctgattctgtatgtgacattttacgttcaatcgttgagatctccaagtcacgaagggtatggacaaaaacattcttgatgaatgtggctgtgtgaatgcgctttttgctgaacgctttaccaatattccatccaaagtgcattatatcaatgcttttaagttgtgagtcaacctttacaggcgatatcttttgtaaggtatcgcttgaactatattctacgatgtatgcacataaacggttgagatcttcttcactcatataggcgaccattgtttgcttcgtatagctgaggaccttttccaatttggtttgaatagcacgattcctttttgcgatagaattgattcgcataacttcatattctgaaggttcagaggtcatttcttcagcgctaggagcaggggcaatgacactgggagtagcctgatttgaatcttcgattgtaagggattccggagcagaaacggtgtcattgtgattcttcatcgtttgaaaagcagaaaaacgcaatagaaaagcttctatgcgtggcagcagaatctgattgaaagttgtctgtaggctggcatagatcgccatcaagacaattactgttgcaaaaaatgcaacactactactgaaatcgtcaacacctttggataaaataaactgacgagctaaaacgccaacaacaagagtacctaccaatacaagggaatagagtgctatatgttctatacttttctgattcatagtgatatttgttaattgtttgtgcgcaaatatatgtcatttcatagataccatgttataaatccaagaaagtggcagcatttgtcctcgatatggtacttatttctatgccatctatgccacaatagaataaaaaagaagagtccgacaaggttttacccccatgtcgaactcttcttactttacagaacttttactatttcagtgaaatcttattcgccgtctctctcttctttgaattgactaaatgtaggctcggcaaacaacgcctttccgctttacagcggtaggttttcgcttacctgcccccgaaccgtacttacacgtctccatgtatacggctctccatctgtaacatcatcttacttgacacatctctggatttttgcgttacactccgcacatacaaccaaagtctttctgtgcatgtagagcattttgcgttcccagtcatttttaccttttaactctttgagtgtgcggacatggtgcattaccacttctccgtgcttgccacatagttcgcacgtttttgttgtaagcctttctattagactcaacgatggcgttttgaacatgtacggcagattgtcacttggggctgtttcacaatccgttttgcgggcatatccctcattatagaataccctgtacttggtttctcctcccttgtttacaaaaggtactgcaaagagattgtccttgcggtatctttcaatgacttttctcactgacatattcagcttttgagcaagagttttgtacatggagaacttcataatacagccgaaagagcgtcccaaagccgatgcattgtttgctattgagtaatagttgtagaaccctcgtatttcggtattaaactgagatacaatctcgtgcgcttcattgtcaatcatataagtcctgccttttgacacccatgtctccttgccgtgtttggtgacaactttcatggcttcgaggctgagcagcttgttcttgattacttctcttgaaacgtgtagtatcacattcccgttgaagtatctgcgcactgttccgttactgtttctctttgtggcatagtctttacggacatatatttcgtaacccaaaaattttgcgctgtcttgtgcatttgtaatcaaagtcttttcctgtgacatctccagccttaacttttcctgcataaacttagtgatgtcagctttgattgtctcacattcgtttttcgttccgataactccgataaggaaatcatcggcatagcgcacatatttcaacctgcgaaagtttacatccatatcattgccacttggcattgtaagtatcagcttctgcttttcgtgcagttcttctaccatccttgttcttacgtttacatcctctacttcatttatcctacgttttaggtagtgtactctgctgttgagtttgcaaatatccttgttgcggcttcttgctgtccctttattgaatttgttggcatattcatccatgtacttatcgaacttatctaagtatatgtttgccaaaatagggcttatgataccaccttgcggtgtccctgaataagtcttgttgaattgccactcttccatgtaccctgcattgaggaatttccgtatcagacgaagaaatctgtcgtctgctattctgtctttcattatttctatcagcacattatggtctatgttgtcaaagaagccttttatatctccctcaatgaaccattttgcaccgttgaaattgttttgtagacttttcagtgctgtgtggcagcttcggtttggtctgaaaccatgcgatgtccactcaaagtgtccctcatatatggcttcaagcaccattcttactacctcttgaaccaatttgtcttcaaaagacggtattcctagcggacgcatcttcccattctttttcggaatgtaagttctctttgcaggattgggactataagtctcatcctttatactctctatgagtttgtttatcctatcaatgctcatttcatcctcagttttgccatctgtgccgggtgtcatgttgcccggctttgcatacatacgttggtaggcgacaaagaacatctgttcattgaatagaatacggtaaagcctttcgtatttatactcgggctcattgctgtgtccagctaaaatgtttaatacttgctctggatttctcatacgtctctcacgttttccgttgtttgtattaaagttacagactacttcccttcgccatgtacaaggctttcccttgctcagactactacggaagttccgttaccatatcggatattcaaaagctttctttatagctgtttgttccagcgttccgacttaggtaatccccagttagttctcttaataactattagcacgacatactgtcggatgtgactttcgttcttgtccgcttattgcggctgtgtcatagtcggttctttatgctctgcactaacgcacaaaataggcagagtactatgaaacaacgtatgtataatagtcttccgttgttgcaagatttggtaccactgaactatcattcaaccaatcaaggcttcatccttatgtatgtcttttcgtcttgcccctcagtcgccacctgactattagtggacttggagctttaatcagtatgctacactctccatcgggtttcccttttggataaactgattgacgataggactatatcgaacccaatcctaacttcttgctaaagaagtatttattaagcgaccattctgggcgcaccagcatatatctgtgtcgtggtaacattcttatgtgttagcatcttcgatactgtgtaaatgtctgtgcctaaagagatttggatgaccgcatacgagtgcctaaagcagtggaaggttatgtgttttcttattccggcttcggcaatccactgtttcaagggatgatgggtcatggagcgggttaagcctttgaagacttttccggtgccccattcgccacacaactccagtgcttcctgactgatgggaagggtggcctcggtttctgtcttttcggtgcaaatacggatgtagtagccttggtccgggccaacctcaaaatcacgccagtccagtttcagaatatcactgatacggaggcctgttatgcaggcaaacagggaggcctgttttaagactggaatcttacacggagtagcggccagtttcttgacttcatcaagtgtcagatactctttcttgacttctttccattcaatcttttccaggaagtcgttcaagttctcacgcagcatcttctctttataggctattttcaataaggcacggaacgtcgaataatagccggctgccgaattgcgtgagatgtaggcattgggatgattgatctgtttgcatttgagcaggtaatccctgaacttctcgcacagttccacggtgacatcgccaaaggtgcatttgccgccgacaaatttctcgaagtggttgtaaacacaatcccatttctcatacttttcccgtgccttagtccggaagtaggcaaggaaatcgactttttgcttgttcttgtccaggaacccgaattcttcattgataagcgactggacacagatacagcggatagcctctgctttgttcaacatgtcctgattgaacattctttgctgctcgttcttgggtttggcatagatgtagataccaaggaattcccggcgactcatcttcatcgtataaggattgcggatggccggataataatctagataaagagatatgcggtcgttacgcaatggcttttgtctcaaagttacgttggtgcatgtaagtgtcatagctatattgttttttgattaatacttgtttttgttgcaaataaaataggtgttctaatggtggtatttatcaccggaaaataactttcgattcattctatctttggaggctcaaagaacttgtccagctctgcccgcaggatcttggtatatttaccgaccttgatacggggaatattatggtatttcacataatggtagagttggtctcgtgtcagattgaatcgctccatcgcttcggcaatggtgtagtatttgggctcttctggggcaatgagacctttggcaatgtccacatgctttttggagtagtacaccatgatgccgacctttttcgtgggaatggcattctttgaaacaaaagaatagatggccgtcagtgtcataccgaacttctcctgtatgtcttgcgtgctgtaccattccttgatttcaggatcgggagctttctttgcaaagtagtcatcaatatgctttttgctccaataggttttaccacggtgaaaggttcgtggaatattatgttccttagcgatatgaaatatccaggaatcctttactccatacttttccttgacttcagcggtggtgtagaaatcattaatggaaggtttgtctctgactggaatcttaaattctatagacttattgaataagttatcaatatcttcttttttcaatagaaatttatatccaagtcgggtggcttttagctcacctcttttcagatagccataaagagtaggtcgggttactccaatgtatgtggcagcttctgtaatagtaagaataggtttgtctctgatttttgcaatcggcttctccttgatgactttttcgacaacttggttgttagccttaatagaagcctcacgtttcttctgtttatacagaaggtttgcacatctgtgcgaacaacaggttgtagtcgttttatgcgcaatgaattcttgcttgcaccacgcacagattcgtctgatttcaatgttgctactcatgttatttctccttatttctccaatatttttgtataactccgtaaaatcccgtaaaatggtgtaaaagttttccacgaccttgccaacgataatcctcggattttcgtggtgaggtacacaggaggtacaaaaaatggcgtaaaaaggcttagcaacgattatcaacgatacttaagcaacaaaaaaggcgcccgtaaagagcgccatattaatcgattataatcaatctaactatttgataatcagtaaattacttaccgatgcagaatttttcaaatatattaccaagtacctcatctgtagatatttctcctgtaatttcaccaagatagtgcaaacattcccggatatcttgggaaacaaattctccgctaagattcgattgaagaccttcttttactcgacgaatagcctctaatgcatgactaagagcttcgtagtgacgaatattgctaacgattatatctgaagaatttaatggatttaaattcacagcatttgtcaactcacaaattaaagtatctaaattagctcccgtacgagctgaaattggaataatcttttctcctgacgtaaatagtcgtatggtttcctgaggagtgagtaaatcttcaacctcatctgttttatttaaaacaattaccaaatgtgcatcagacgatatatgggctttcacttgtttgtaatactcttcaaaagattctgctccacgtttcaaatctgtcaaaagcaatataatactcgcctgccctattttggcaaaagttcgctcaattccgatgttctccacctcatctgttgtcgaacggattcctgctgtatctataaaacgaaaggttataccatttaaattaatcgtatcttcaatggtatcacgagtcgttccagctatatctgacacaattgcacgttcttcacgtaaaagtgcattcaacagtgtacttttaccaacattagtgttacccactattgctaccggtaccccatttttcaacacatttcctaaagagaatgaagcacataaacgtaccaacaattgctctataccactagcaatgcgatttaattcttctctatctgcaaactccacatcctcttctgaaaagtctaattctaattccagcaatgatgtaatatgcagtaattctgaacgcagacgcatcagttctgttgaaaatccgcctttcatttgcaataaggccattcggtgtgatgctgctgatgatgaagatattaaatctgcaacagcctctgcttgtgacaaatccatcttaccattcaaaaaagcacgctgagtaaattcgccaggagctgccaatcgagccccaacatctaccaatagtttcaataaccgctgctgaatatagactgagccgtggcaggaaatttcaacagactcctctcccgtaaaagagtgaggtgctctaaaaatagttaccaacacttcatctatcaactctttaccatcacgaatacttccaaagtgcacagtattacctttagctgcagaaaggtgcttaccagatggagattcaaagatttgttccgttaacgatatacacccgtccccagataatctaaggactgcaatagcacccatacctggcgatgttgaaattgcacaaattatatcagacgtattcatcatgttatgtgtttgataaactattaccgacaaaaatacgctttttcaactaaagcaaaaaatgagtatccgaacttttagccgtttattcaaacatttttagatatcagacgtatatcttctcaataaaacaactaaataaaaaacaacctattatgaaacaagtagttattttagctttgttagcatttttgatgctaccggcttttgaaagctatgtacaagcaacaaatcctatgcaaacaacacaacaaacgctttcaaaacaacaacaacgacaagcaaaaaaaaatttacgtcgacaagctcgagctcaagctgatcaacaagcattcaatgctgcaattgaagcgatgcgcgaccgcaactgggtattgatggcaaacaccctgtatggtcctcaaggtgctgcaattccagtttcagacaatacaaactttatccaatttaaaggtaataccgtgtatgtacaactggcttttgacggcattgctggccccaatggattaggcggaatcactgtcgaaggaattccttcacaaataacaaccaatacagaccggcatggtaatatcacttactctttttatgtcaatggcacagcattaacagcccaagtaattgtcaatctatacgctggcagtaacaatgcaaatgcagcagtatatcctatgaccaatggcaataatctgactttttcaggaactcttgttccaacatctcaatcaggaatattccgtagcggattcattagcttctaaaaaaaatggagaacaaattgttctccattttttattcattattgtgccttgtcaagttctactgtgaagtggcgcatgataggaaattctttcgttatcacatatccacgtgtaattgattctcgacggtcgtatacattcttcaaggctgctgcaatcacatccatatgattattcgtataggttcgacgcggtattgccaatctcaataattccaaacgcggataacggttttcacgagtcaccggatcacggtctgctagaatagaaccgatttctacaccacgaataccagcttccaaatataattcaaccgccaaagtttgagcaatgaattcttctttcggtacatgtgtcaaaatctttttagcatctacgaaaatagcgtgtccaccagctgggcgctgatacggaattccatattcatccaattttgctcccagatactcaacctgttttatacgggtttccaaataatcaaattctgtaccttcatccaatccttgtgccaatgcattcatatcacgtcctgacataccaccataagtgataaaaccttcattcatgatacagaacatctggcattttttccataattcttcatttttaaaagcaacaaaacctcccatattaacaatggcatctttcttggatgacatagtcataatatccgcataagaatacatttctttcacaatctctttgattgtcttgttttcgtatcctttctcacgcatcttgataaagtatgcattttctgcaaaacgggcagagtccatctgcaagtttactccatattttttgcacaatgcagatacttcacgaatattctgcattgaaacaggttgtcctcctgctgtgttgttagttacagtcaacacaactgctggaatcttttctctcggatatttctgtaggacagcttctaacttaaccggatcaagatttcccttaaaaggcacttctaactgagtatctgcagcctcatcaattgtacaatcaagagcgacagctttacgaaactcaatatgtcctttagttgtatcaaaatgcgaattcccgggtaatatatccccttctttaatgatagtcgaatataatacattttctgcagcacgtccttgatgtgtcggcaagaaataatcaaatcccaagatttccttaatagcgtttttcatcttataatatgaacgcgctccggcataactctcatctcccaacatcatttctgcccactgtttatcactcatagcaccggtaccagaatcggtcaacaaatcgataaaaacataatcgctctttaatgcaaaaagattgtatttagcttctttaatccactgttcacgttcttcacgggtacttttacggatggtttcaaccatcttaattcgataagattctgcgaatggtaattccataataaatatgatttaattgattagtcaaataaagtctagataaaaaatgtatgctaaatgagttttagaagtcaaactcatcgcgctttttaatatttagaaaaagcgaattgattggtagtatgttgttttctctttgcatacgcttgcaaatatacaaaaagtttacacattacctaatctttgacttattatttctagtcaacaaccatattttttgctatctccttttacgacgtccctcttttgttcgatccagccgcaccttctggggcgtcttgctatttttagctgaacgttgatgaaaagctcctcccccttttggctttcctctttgataaacaatgttagctgtctgaactttctcttcatccatcaacaactctgatatttcaagatcttccggcaactctaacatatctacctgctgcccaatcaatgattcgattgcatcaaatctcggttcttctttttccgacacaaaactaattgcaacaccctctttacctgcacgcgctgtacgtcctatacgatgaatatattcctccggtatggatggtatatcaaagtttattacatgcgatacatcttgtacatcaataccgcgcgctgcaacatccgaagaaatcataatacgcgtagaaccttctttgaaagctcgcaaagcatttaaacgtgagttctgtgccttattggaatgcaatacactcaactcccctgtccaataatcagctagtttttcaacaatgcgatcagcattttttttcgtttctgtaaaaatcatcactcggcgatattcctctttgtctgccaacaataatttcaacagattaatcttcgttgcaatattcggcacatcataacgatattggctgacaaattccactggagttgcttgagctgcagtttctactctcacaggatcaggagacaaaaattcgcgggccatttcatctatagtagcagaaaaagtagccgagaatagtaatgtctgatgtttttccggtatcacttccaaaatacttctcaactgtggcatgaatcccatatccattaaacggtcagcttcatcaactacaactgtttttacctgactggtacgaataatgccattcatatatatatccataaatcgcccaggtgttgcaactaacaaatcaacaccctcataaactgctgattgttgagttcggatattagtcccaccataaataccaacacaacgaatatccataaactctgtaagcaattcaacactttcgcatacttgcacaaccaattctcgggtcggcacaatgacaattgcacgaggatagttaccttgagcataatgtagcttcattaacaaagggattaaatatgccaacgtctttcctgttccagtctgagcaattcccacgatgtctttacccgaacgaataacagaaaatgcctgttcctgaatgggggtaggttgatcaaatccggcttcttcaagtgccatcaatatctgtttgctaatattcaactccttaaattccattatgcaatacttttaatgtgtcctaacctattagagtgcgtaaaaatacaaaaaaagaatacctctacaaaaatattttttattccacaacaaataatacactaatcatcagtattttacaccataccaaaaacagaatattcattttttaatcatttatgcaaacgttttatttgtttattccaattattatccctatatttattccactgataaccataaaacttttgagatatgactacgactattactttcaacgaattgagaaaaatcaaagacatgttgccctcaggaagtatgcaaagaattgccacagatttaggcattgatatagaaactgtccgtaattattttggaggagacgattatgatgaaggaaaagctgctggattgcatatcgaacaaggacctgatggaggcattgtcaaattggatgacactactatcttggaaaaagctaaagaaattttacaacactaacaaatgaataaagaaggtgtgtcaaaaatgacacaccttctttattcattctatactaacctgcaaatctgtatatatgattgcttctcgcgccttggaaataatataagcagcaggcaaattcatagcttcattagcatttattaccctccttaaaattgaagctttactctctcctaaaacaggaactaaaatcaatttactatttaatatcagttggccagtcatagtgattcgcttctgtttggacaaaggatgttccgctacagaataacaatgtttgtccgttaacaagtccaactgattagggaaaattgaagctgtatgcccatcttcaccaataccaagaattacaccattaaattttggtaaacaagcatagccaggcaattcccatttcaccatttctgaataatgttctgcctctattttcggctcacgctcaccatgaatccgatgaatatgttctctcgggatattcaatggcgtgaacagtaattcatccgcatgcatataattactctcatcatccgttggctcaacacagcgttcatccacccaataaaaacgcaattgttcccaatttatacgctcccgatattcatctgcccacaaacggtacattttttgagctgtactagctccagataatgccaaatgaaagggttctttatgctgctgcatcttttcaatcaaacactctgtcatgccacgtaaggcatcttcttgagaatcgtatacttctaatttcataactttagtatttggattttagcctttgctaatttacaattttccctattttcctacaagaggaaaataaataaaattactacgtaaaaagactatttatgttagtcgtttttacctacttttgcattctgtaaaagtcacataataataactagaaggagtatttatgaataaaatcattctcaagcccggtaaagaccgctctgtatttcgctatcatccatggatattttcaggagctattgccaaaggcgaaggcgacctacaggaaggcaatctggtaaaggtatacacatcggacaaccgctatcttgctacaggacattgccaaattggctctatagcagtgagaattctaaccttcgaaaacgaaactattgattataatttttggcgcaatcgcattgctgatgcctacaatatgcgcaaggctatcggattaacagaatctccaaccaataatgtgtaccgtcttattcatggtgagggagataatttaccaggacttgtcattgactattacgctggagtagcagtcgtgcaattccattctgtcggcatgtatttggagcgtgaaaatatagctcatgcactactagacgtaatgggtgataaaattaaggccatctatgacaaatcagaaggaaccctcccctataaagctgccatagagcctcacaacggctatctttatggtaaagcagacaatttcattgcattggaaaatggcttaaaattcaacgtagattggctagaaggacaaaagaccggttttttcattgaccaacgcgaaaatcgcagtctgctggaaaaatatgcacaaggtaagaatgtactgaatatgttttgttacactggaggattttctttctatgctatgagaggaggtgctcatttggttcattccgtagatgtttctgcccgtgccatagaacttaccaaacgcaatgtagaacttaattttccagaagattcacgccatgaagcatttgcagaggaagcattccaatttttagaaaaatctcaaaacaaatacgatttaatagtcctcgaccctcctgcttttgccaagcatcaaaatgtattgaacaatgctattcaaggatataaaaaattgaaccgtaaaggtattgaaatcatcaaacctggaggtattatatttaccttctcctgctctcaagtgatgacaaaagaattgttccgccagacagtgttcactgcggcagccaatacaggaagacgtgtccgtatcctacaccagctaacccaaccggccgaccatcctgtaaacatctatcatccggaaggcgagtatttaaaaggacttgttctatatgtagaataaaaaatagagtgactaaagtcactctatttttactttatcacatcatgctttgtgccacttgtatcacctcttctgccaaagaattagcagcttgttcatcttttgcttctgaataaatccgaataatcggttctgtattcgattttcgcaaatgcacccatccatcagcaaaatctatcttcacaccatctatatctgtcactttttcattcgcatactttatttttaatccttccagaattttatcaacatccattccaggagacagtgtaattttatttttcgaaataaaatatgaaggatatgtctttttcaattcggtcatacttttaccttccgccacataatgagaaaggaataaacccacaccaactaacgcatcgcggccatagtgactcttaggatatattacacctccattaccttcaccacctattaccgtgttagtttctttcattttagccacaacattcacctctccgacagctgctgcattgtattgctgtccatacttttctgtaatatcctttaaagcacgcgaagaagacaaattagataccgtattgccaggtgtatgtttcaagacatagtcagcaacagcaaccaacgtatattcctctccaaacatctcgccattttccgatatcagtgccaaacgatccacatcagggtcaacaacaataccaatatcagcccgacattccttcattttattggcaatttgcatcaaattctctggaattggttccggattatgagcaaaacgccctgtcggctcacaatttaattcaatcacatcatttacacctaatgccttcaataaccgcggaataacaataccacctactgaatttacagcatcaaccacaactctcaagttagcctctgcaatagcctttttattcactaactccaaccccaacacttcatctatatgatattgcgtataatccttctctgtaatatttcccaaattgtcaacatctgcatattcaaactcctccttctctgccatagccaatacttgttttccatccttatcagataaaaactctcctcgactattcaaaagtttcaaagcattccattgtttaggattatgactcgctgtcaaaataataccgccatcagcattctctgccgtcactgcaatttcagttgttggcgtagtagccagacctatattaatcacatcatgccctaatccagataaggttgcagatactaatttcgcatacatatccccagaaatacgtgcatcacgccccaatactatttttgctttttctttaccagccccttttttcaaccaagttgcataagctgaaacaaacttcacaatatctaagggggtcaaattatctcccggacatccacctacagtcccgcgaattccagaaatagattttattagtgtcatattacaaacaattttagttacacgattcaaatataatagttaatatccactaatcaaaactggacatatacaaaaacaaaatgtccggaaagaggtactctctccggacattttattttaaatttatactcaaatcaaagctttgtaagcatctgcacttaacaatccatccaactctgactcattatctatcttaatttttacaatccatccttctccatacggatctttatttactgcttcaggctcactttctaatttttcattaaattcaagaacctctcctcctactggcaaataaaggtctgaaacagtctttacagcttcaattgtaccgaaagtatctcctgcttccaaattgtcaccgacagtttcacattctacaaaaacaatatctcctaactggctctgtgcataatcagtaattcctacaaatgcctcttcaccttcaacacgaatccattcatgttccttggtgtactttaattctgctggtacgttcattattaatgatttagattaaatattttttttattattaccgaagagattcccttatattctctcggagactacaatacaaacgattgaattataatccgacctcaaagttaatcgaaaaagtcaaagaagctaatctttcagaagattaattttcttttttcattacaagaaacaaaatgcactcatttacagatacatacaaaataagcagaaaaaatattttatttttttctcaaaatcccttgttattaaaaaaaaagctactacatttgcactcgcaatcgagaacaacagaggttgtttgatgcagaaagaaacattggtgcggtagttcagctggttagaatacaggcctgtcacgcctggggtcgcgggttcgagtcccgtccgcaccgctaatttttctttcaacatattaaatattggtgcggtagttcagctggttagaatacaggcctgtcacgcctggggtcgcgggttcgagtcccgtccgcaccgctaaaaaatcctcaaagaaaatctttgaggatttttttatatctattctggatatttaaaccaatatcaccgacttatttgtctttgacataaatccacaaaaaaagcggctggttctcagccgcttttctatgattatctaattagcattatttcttagctaactgaagcagaatatccattacctgaatagcgctcttagatactttcgttccaggtccgaatactgcgatagcacctgcatcaaacaagaactgataatcttgatgaggaataacaccaccaacataaaccaagatatcctcacgtcctaatttcttcaattcagcaataacagcaggaactaaagtcttatgaccagcagccaaagaagaaacaccaatcacgtgaacatcattctcaacagcttgtttagcggtttcttccggagtctggaacaatggtcccatatccacgtcaaagcccatatcagcataaccggttgctacaaccttagcaccacggtcatgtccatcctgacccatttttgcaatcatgatacgcggacgacgtcctgttaattcagcaaattcatcagtcaatgcttttgctttttcgaagtcggcatcattaccggcaacgcttgaatatactccactcacggttctaattactgctttataacgtccaacaactttttcacatgcataagaaatttcacccaaagaagcacgtttcttagctgcatctactgccaattccaacaagttgccctcaccggtttcaacacacttagtaattgcttccaaagcagcatccacctcagcttgattacggttagcacgcaattctttcaagcgagcaatctgagcttcacgaactgcagtgttatcgatttccaaaatatcgataggatcttctttatccaaacgatatttattaacaccaacaattgtctgttcaccgctatcaatacgagcttgagtacgagcagcagcctcttcaattcgcaattttggcaaaccagactcaatagccgcagccataccacccaacttctcaatctcctgaatatgttcccaagctttatgaaccaattcattagtcaagctttccacataataagaacctgcccatgggtctacagccttacagatagtagactcttcctgaatataaatctgagtattacgagcaatacgtgcagagaagtccgttggcaatgcaatagcctcatcaagagcattggtatgcagagactgagtatgtcctaaagcagcacccatagcttcaatgcaagtacgtccaacattattaaacggatcttgctctgtcaaagaccaacctgaagtctgtgagtgagtacgcaaagccaaagacttcggattcttcggattgaattgttttacaatcttagcccacaacaaacgaccggcacgcatcttggcgatctccataaaatggtttgtaccgatagcccagaagaatgacaatcgaggagcaaatgcgtcaatatccattcctgcattcacaccagcacgcaaatattccaaaccgtcagccaaagtataagctaactcaatatcagcagtagcaccagcttcctgcatatggtatccggaaatagaaattgagttaaacttaggcatatttttagaagtatattcgaagatatcagcaataatcttcatagagaacttcggcgggtaaatataagtattacgcaccatgaactctttcaaaatatcattctgaatagtacccgacaactgttccaaagtagcaccttgctctaaacctgcaacgatgtagaaagccaaaataggcagaacggcaccgttcatagtcatagaaacagacattttgtccaatggaatctgatcgaacaaaatcttcatatccaaaatggagtcaacagcaacaccggctttaccgacatcaccgattacacgcgggtgatcagagtcataaccacggtgagtagccaagtcaaatgcaacagacaaacctttctgtcctgcagccaagttacgacggtagaaagcatttgattcttctgccgtagaaaatcctgcatactgacggatggtccaaggacgcaaaggatacatagcagaatacggtccacgcaaataaggaggaatacctgcaacataattcagatgttccattcctttcaaatcctcggctgtataagccggtttcaccggaattaactccggagtcgtccaatttttagcgatatggttggctttttcccattcttcagcagtcatggtagccttttcagccgctttaatatttatatctttaaaattcggtttcatcttttaaatgttaaagagtttattgaattaaatgccaagtttctgttggtaagctttcagttcttccaatacgttattcttaacgtggatataattcatcaagcctttagcctccaactcaggacggctttccggattaccggcaacaacaacgatggctttatctttcaatttttcaaaagcttctggagcaaatcctgcatattcatcatcagagctacacaatacaacaatagaagccttattatccaagcaagcctgaacaccttcgtctactgttttgaaaccattgttatccttcacctcaaaaccagcacaagcgaagaagttacatgcaaactgagcacgagctttacgcatagctaaattgcccatcgggaacatataaactaccggacgaccatttttagcagcaaacatatcagttttcaaacgcatagcttcaaaagcagccggacctctataaggtttcaaagtttcaacctcagcatctgctgcagtcatatcttccggttcgaaaacacatgcgcacaattcacgatcaattttctcattgaaattcgggaactggttcacaccaacaaagttttctttacgctgagcgatagccaagtcgcgagcctgagcagtagccttcacagcagcctgaacaaaaccctttttcatagcctcaacatatccaccttgttcttgaacttccaagaataatttccaagcagcctctgcgatattctgagtcaactcttcaatataataagaaccacctgctacgtcaacgatcttagcaaaatgagactcttctttcaacaataattgctggttgcgagccacacgttctgccaattcagtcggatggcactcaaaagtatcgtcaaacggatgaactgtaaatgaatcaactccgcccaatacagctgacatagtctctgtctgagtacgcaacatgttaacgttcggatcataaacagttttattccattctgaagtttcagcatgaatattcatcatacatttgcaatcgcagcaaggattataagccttcacgatatgagcccacaaataacgagcagcacgcaatttagcgatttccataaaatatttagatcctgttgcaaagtggaaacgcattttaggagcaatgtcgttaacactcataccagcatcagttaatttatccaaatactcaactccggcagccaaagaaaatcccaactcctgtacgatagacgaacctgcattgttaaatacatatccacccacttcaatagttttgaagtttttataagcagccattttctcagcattagctttgataacagcatatggattttcgttgcaacattttcctttacgagtcaaattactcaacggatcaatattaatacctccatgaattttttcaggagcaatgcctctttcttcaacaacagccttgaaagcatctaaaacaacactcttatggcatccggcaacgaagttgatttctacacactccagacagatatccttcagcagagcctccatatcggcttttgtaaaatcgctacacccgcttaatacaaatcccaaagaattaactccacgattcagtacatccaaagcttttttatttgcatcagcaacattttcaacaacaatatcctgacgtatataccagtcattgttatctttcttattacctctgacaaatgggaattctccaggaagacaattcaggttcttcaggtcttccatattctccaaccgatacatcggctgaacattgaaaccttcattggttctccacacaagctttttattgaaatcggcccctttcaggtccacagtgactttgtcgatccactcttgcatcgtgttcggcgcaaactcactgaaaagcttacaattttctttttctgccataatttatatatttaactgtaactgtttgtttgaaaaaacgaacaaatttagcccttttagaggtataaaaaaagtatttacagccttttttcttctcctaggctataaattatacaccaataactcacaaagagtactagcataactttacatttttcaaaaatacaaacaatagtctaatacaatgttacaacatcatttacattgttcaacaccaattgatatttgataaaaccacctgttctgcttgaatatttagtatagatagcagtgatatttacttttttgccatgagccggcagaggttccaaggcaaatcttgaatatccgctggaacgtaataaataatatttaccggccaattcaaaacaagctgttccataatatttattgccgttattactatatgcataagtcggaactgtcacatcctctccaggatccggagctgatggctttgcaacttctgctggattttcacgatatgctttccaatctgaaatcacatccacatatgaatagttattataaataggctcacccacttcttgagataaagactctaaaaatgaaggatatttatctccgtcataatcgccgaaataactagtcaacccattgatgcgaaccaatcgtcctaaatcattatcatttaattccgatggagaattaaccactaaagtatcagcctttgtcatgcctaccagctcacccttaaacacatgagcattaatataagtgcgcacatccatatacccattggcataatcagcatccacactggctgcacctagactcaacatataacgatagctacccaacaccaagtccttcaccttcacataaacaatctgccccactttatattcgttataaataccggaaattcccaacttcacttcaatcgcaccggattcatcctggatatacatcgtacgataaatattaccggcagcatcactactaatcactttacctttaatcacccaatccttttcaaccacaacacctttacctacaccaccggcacctttaccataaacatcataaaacagttgtttcacatcgctaattggcacaattgtttcaaaatccgcatcagtagccggtttttcacgcgcaggatcatcaaaatcatcataacagcccgacatcagcagtcccaatgccaacaactgcatccatatcatttttttcaacattttcataacctatacaattaatctcattagaaacgcaagtacacattcaaataatatgtcgtacccatcatataaaaatacttggtatcaaaacgggagtaatagttgaatttctctccttcctccacagtgtttcttttcaaacgcatctgctcataaccaccggttttgatatcctgattattcagaatatttttaacttctacactaaatcctaagttatagcgtctgttaagataccaggatttactgaaattggcattcatgacataataatcaccatagcgttcttgacgtaccattttgctatacatagcttggcgctccgccggactaaacttgtcataattcaataaagcacgatcggttcggtacaatgggttcatatcgatgtacatagcattgaagtaattcaaatcaataccggcataaatattatgcggaccacgataattcaaaccaatactggctgcagtctgcggtgtccctccgattttcatatccttccaatacactcgctcattactgattacttccccactgttatccaccgtttgagtcacgtaaggattagaggtatagatatatttgccatagctcaaagccccttgtgcttcaatacctgcaaccaaaggcactgcaataccgaactccaaaccggcatactgttgatcaataccgctcatagcataattcgtaaaggcacggttctgatcatcgtaaaaactaatcaaatccatcttgtctttgacagaagtaaaatatcctgtcatacgtaaacgcacagcagccaaacgcaacgcataattcaaatcagcactcaaaatcttttcggttgtcaaatcagacatcactgaatttctagtacgtggagagatgaaagcattctggaaaaatggagcctcggtcatatatccaaaatttgcatataccaactgattccctgttatcttatatgtcaaaccaactttagcggtataagtccaaaagttctgttttttagaatttccttttgaattattggcaaacaagcctttccgataaaggccctctctccaaaatgttgtatatcctccctccaaaccggcatatccttcaaaactacccttattgaaacggtaggcagcccacaatttctcacttaccaaatgagcattgtaatcataaccatatttatctccttttttcaccaaacggttaggtgtttccagattattctggataatatcacctttaccgaaatctctttcagcaaattgatcgacatccagccaataatcaccacccagcaaatctttgatctctttataatattctgtcttattacgacggaactcgaaaccgccactcaattttccgtaattattcaacaatgaaaccacttgtaccttagcattaaaatcacgctgatctgtatgacgttcttcaatgacatattttgaacgggtagttccatcggcaattgtcggatttccccaatactctctgtttggattcaacaggctgttataattcacattatacatgcgatcccagtttatctgccgcacattccagtccgtacgccatccctctttcacccaagctgccatttccggattatcattgtaatagctgggcagatttctataataatccggacgcggatcctgtgcgtcataccaatccaatgctgaataaccgttttgaccgaaacgataagaaaccgaagcctgcaaattaaatttattgctgggctgataataataattcaacacagccaccggctcatgagttctgcgcacacgggcattacgcttatcgccatcctgcttaccccagttcgcattataataattacttcccaccaaatcataaacctcctgagttgaaccggtttgcacacctctttgtgtcggagtgccaaatacagtcaaggccagtctgtttgcatcattcagccttttttcgatagaagcgaaataagcccaagcattataataaacgcctttaatccagtcgttaccaccttgacgggtagaagcagcaacagcatacgaccaacctttctcattctcacctgatgcataactcaacatcactcgaaaacggtaggcgttattggcattcaccagactggcacgaaatccttttctcatctgtgatgctcgtgcattgatattggtagtaccacttactccacctaaaccataatctgaaatttccaaaccggtagagacctcctgattacgtgttgcatcattcaaaccagaccacaacgaccaaggtgaatatccggttaaagcatcgttcaaataaataccattcagataaacatccgacattccgttatcataaccgcgagggcggaagcgcacagaactgaatttatagctggcaatactattgaaaatatcctttgaagccgacaaaaccaccggcattgaaagtgcatcatccgttgtctctgtatccaaatctgcaaaatcgtcgtcaattcctccagcattcggactctctgctaccatagacaatacatgcaaatctttcatctcattttccaccttcacattcaccaccaaggttcggtaatccacagcctcaagtattaatttataatcacctgcaggcactcctgtaaaaataaaagttcctttttccgtataagttgtctgatttgaagctccttgcaaaacaacctttacgccatccaatgccgtcttgcttccacgctccaacaccctaccttttacgccaccggcctgtgcaaacgccaacgacgccacactgcaaaacagcagcattaaaaacaatttgattttcatatttagtcgcattaaatttttactcaatcaacagataaacagggaaatggtcactatatcctccctgaaaagtgtctccgacaaaagttcgcaatggatatcctttatatcgtccgctctgttgatgcaaaaatggacgatcgaatatatacccataaaatttgccgtgttttcgtaatttcaacttaccggaagaggcattcagcaaattctcgttcaccaccatattgtcaaacagattccatccgtcctgataagccaacgtcccgtaaccagctttaaacatcgcaacataaggattaaacaaatcgccggctttcacttccgatggttttccttttgctcccaatccttctgtcaggcttctacatatgggatcatcattcaaatcgcccataatcaccaccttcatatccgggtacactccggaaatagaatccacggcacgacgcacaaccttggcagcctccacacgcttcgattctgatgctgtctgtcctcccaagcgggacggccagtggttcacaaaaaagcaaaaacgttcacctcccatcaagccccacaccatcaatacatcgcgcgtcttaaaatccggctgttccggcaatgtcactcttagtgatttgcttccctccaccttaaacatatcaggacggtacaacaaggcaacatccacacctctggcatccggagaatcataatgtacaatatcataatttgccttcgccaatttcggagctgccaccacatcctccagcacattacggttttccaattcgcacacccctatcacggcaggataacttttcacagtcttagctatttcaaaaaatacctgctcgatatttccgatttttttccaatatttagaactgttccaaacctttgaacctcccggagtaaactctctgtcaaatacccccggagacggaatggtatcaaataggttctccaaattatagaaaaccacagcgtaaggctgtttctgtgcatctgccttcggacagactgccagtaacaaaaacgccaacaaaataaatagattcgttttcataatataatgtttgtcaattacgcaatccccaatcacccggcaccaactgtttctccacctccatttcaacatctgtcggcaaatgcttaaagaaatcccatccggtctttctttcaatctcatccacagacatcatatacgaagcgtttacagaccccgtgttagccttatgttcaaaccagaatccggtagccttatattttcgagttcctccttccatcgtcagactgagcaacactttataataatagttgggcacggctattttcttgccggagccatcagtagcatatctgactgtttcattacctcctacagtcttcaaggcagcaccggtcacaacatacagcgtatcacatatcttagcccagctccttactttttcctccagtttcgcccagatttttttattgaacctacccaactgcggagtcatattcgaataataaaacgtctgttcgttcattcctcttgccgcagtccggtctcccgaaggaatctgatgtccgcggtcatatcctctcaccgaagcattcatttgctgaccggcaggtatattcggatctgtttgccaagcctctgtcctacccacacttcccaaatacatcgaacaaagtggataagccacccaataagcgatgcgctccttagtatcaaacaacatagagtaatttctcacttttttaccaccaacagtcgtttcatgcgtcacaaagcggtaattactgccttgtgcaattcccggcaattccatccaactttttccctcatccggatcgctttcatcaactcctttttgcgtcaaaaccgtttccacatactttccaccggctgtcgccctcaacgtaactgttctactcttttttccttcattttttccgtaattcacggcaacttttgcattgccatgcccgttatgcgacgatacggaacaccaatctttttcttcttccggataagacaaatccaactgccaatctccttcacaggtgacatctgcaaattgtgccacatcataagcactcacaatgctccgttgcagctttatttccaacaatccatcatactcctcatccccatcctcgctatcacatccggcaattaaaacaccggctatcattatccggcaaaaccaataccaatacttcatcctttatactattccgctttagataataatctctgccggagacacctctcggcagagactatatataacgttaatatgcgattacttagaataacttgtccaagttaaattccaaatagaaacacgatctttatttttatttaattgagaaggtgcattattggtaatcaccacttcaaaatcacctgcaacattcactgcttctacgaactcatacttagttagtttttgaacatcagcattttcctttttcaaagacaaagttttcactacatttcctccctgcttaatctctatctttaaatcgacaccatttttttctccaaaagcatgaccataattaaaacgcaattcgccacatccccccttcaaaattggagacttcacaacccctattgtactagttttcccatttaaacacacagctctatcagcagtcgtaccaataaaaggaaacatagctgcattaatattcactgaatcaccacccgactgaacagcacaattttccacaatccaacctgccgcagttgtttgagatgatttataaccggaactaacctctaatgtattaaaatcagccgaattactttgagcaactacttctcctttcaccgatgcagccacagtattatctgtcaaaccatcaataccgttgatggtaaagataacctcaccttctacatccggagttccggtaacatccagttctattgttccgtttccggcattcaatgttttttcgccacctgctacattcaaaccattaacacctgctacagttgcagaaacagtatatttctctgttcccttggcattgaaataaggaatagaaatcttcacaccgcttacttctttacctacaatcattgcaccggaaacgctcggagttccaaaactcaaagcaacagcttctcctcctgtcaaaccggaaacatccgaataatcacgcggtactaattgtgccatagaattagctgttttactaccgccatacacataagcaagacctttgattatacctttacctgttaaaaacggctgaccgacaatcgttgcatttttagaaatatataccggaaaatctttcccattagcagcaaaatcaaatgcttttccttcccaagtagctacatccgaatttttagcctgagcattttctatctgcacatacattgactggaaatctgctatttgatctgcagtaatcgtcaccggagctatttctactgtttttcctgtctttttaatacaatctgttcccggaacaatcaattcattacatgcaggagcctctgcagcagcaccggcacctttatatgcctgaagctgagccgcagatagatctatttccacttcatcccccactttcaagcccaaaacttcaaaattctctttaaacttgaatactaatattccattacctgcagttgtcgctccttcagtttgaatagagaaaccaccggcactgaagttcttattgtccatgtctgttacgacaatacccttcaccttgtagttgccaatatctgtcttttctgtagtgatcttctttaccaactctgcaattgtcgtatattttttatccccttgttctggattctctccgcttccaccttcaattaattctccattaccgccttcaaacaatttgaaatcatcaaaacgatagccttgattttgttgtacattcggtgtcgaaaaacgaattgacaaagctgttgtaccctctgtcactttaaattcagcagttcccatataccaatgagcaccgtcttccaccgccaaagcataagtcaacggagcccaagtttttccgtctacacttgcctccaatttaaaatcacctacattaatctgcccgaattcaattggataagcagactgaaaaattgctccaaacttgaaggtgaaattagtctttccagttacattaatattattgatattgaaaatagctgaactgctattcattcctacataaggagcacccgataaagaagaaccctctgccggtttaaaagcattgccactgttgctgacatttgcactcttaccgttgtaggtaacaccggactgatccaacgaaccgcctttttcccaaccggtatatttatcagcataaggccatttattattttcattcttttcaaccgaagttccgcaattttcctgatacaaagcctctgttccggcagctccggattcaccctcctgcaccaccaacaccttcgtagaactgattccaatggaaagcgtcaactctgcggaacgagcaccgccaccattctgtgtggttaagatagttacttttccattgttttctcctttatcaggggaaacactcaaccactcttctgctgcagcaggtactttaatactccattcgcggtttgacaaaatttccaataccgattctccgccctcttttaccaaagtcaaagtgtcttgattctctggtacagcaatgaaaggcatgttgttttcaacatcttcatcattacaactccataaactagcagtcatgaccatacaaaagatcatcacaaagctacgccatgcaaataactttttcataaaaatcaaatttaatttatacttacaacaattcccaatcactacgagcatgtaaaagtaagaattaattttaaataccggatattaaaaatgatttttattttgacaatagatatgaatatgcccgctttttatcctgcttaaatcccatataaagagatagcaattatatatcaaagataacaattttttatctttgtcttatagttatgttatctttgatatatagatgtcatatatttgattgggagggaagagagagaaaagaggaaaggaagaggacaccgtttaaaagctacaataccatcggtatcaacaacacaaagcccaaaacgataaacaacagcaacaatttccaaaaccacttcacccacacttcataaggaatccgggcaatacccaaggctccaatcaatacggctgaggtaggggttatcatattggtaaaaccatcaccaaattggaaggccatcactgttgcctgacgcgaaataccgataacatctgaaaatggagccattataggcattgtcagtgcagcctttgccgagcccgaaggtatcactatatttatcaaggtctgaatcatatacatcacacctactgatacaacctttccggcttctcccatcagcgaggctaaagcatgcaaaataggatctatgattcttccctcctgcaacacttggataattcctcctgccagccctaccacaatggccgctgacaatatatctttcgccccctccagaaacaatttgataatcccatccgcattttttccggatgcataaccggacaatatccccattgccagaaatattccggatatttccggcagataccaaccgtgtcccatcactccaatcaccagaaagacaacggtaaatgccaatatcgacaaaatgaaaaaatggaatgatttcctcaatcccaaccagccgaacaaagcaaacaaaacggtacacaccggaacggcataaagactggcagatgcatttcccaccttaaaatttgtacaaggataatataccgaaaacaatacgagtcccgtcaatatcaacccatacaccatccaagccacccgcgatgtatggaaagccacctcctcgattccctcatttctacgatcgcgccaataagcatctgcctcatacatgggagacaaagtcggtttgcgctttatacgtcctgcatatattaatacacatgcaatcagaatggcggtcaatacaacccaacaaaaaaaacggtactcgaatcccgaaaacaacggcaagccggccaatccttgagcaatcccaaccgtaaaaggattcagcatcgcacctgaaaaaccgacatgcgcagcaacatataccatacacaatcctgtaatcgaatcgtatcccatcgatatggccaatggcactatgatgataacaaaagccaatgtctcttcactcatgccaaaaacagctccaaacagactgaataacaccatcaccatggcaataactatattatttactcccaatcgtttcatccatgcatggcgctccaatccctgtgtaaaacgtaagaatgaaaaaatccccacatcaatagccctactgctgttcataatctgaaaagcaccaccgataatcaatagaaaagcaataattcccgcctgcttttcaaacccttccaacaaagatgtaaacacctgccacgtctgcggagcctgctctactgcatgaaacgacccttccacaatcacagttctctcagcaccattcacctccactgtctgccgattatattctcccgccggaattatccatgacaaagcagcacaaatcaaaatgatggaagatatgatcgtataggtatgtggaattttctttagcatagtcttacatttttttattgttgcgcaaagataatattcttgtgatattttacacactctctttgagataatccaaaattattacgaaattcgcaacgcacaaaataataaattcaaaactccaagaccatgaaaaagactagagcagccgtcgtaggatacggcaacatcggaaaatatgtaatcgaagccttacaggctgcccccgattttgaaatcgcaggaatcgtgcgtaggaatgcttcacagattcccccagaaattacaaattacaaagtggttagcacattaaaagaattagaagatgtacaggtcgccattctctgcacccccacgcgtagtgtggaaaagtttgctctggaagcattggccatgggcatcaataccgttgacagctttgacattcatacacagacggtagcgcttcatcgcactcttgacgaagccgctcgccgcaataatgcagtatccgtcatgtctgccggttgggacccgggttccgactccgtaatccgtgcattattggaggcttgcgctccaaaaggccttacttatacaaatttcggtcccggcatgagcatgggccatactgtagctgtcaaagccatcgaaggagttaaagccgctctctccatgacaatcccgacaggtacaggaatccaccgccgtatggtatatattgaactgttggatggctacaattttactgatgttgctcgcaaaatcaaagaagacgattattttgcccacgatgaaacccacgtcatgcaggtagaagacgtaaatgcccttctggatatgggccacggagtaaacctcacccggaaaggcgtatccgggaaaacgcagaaccaactctttgaattcaatatgcatattaacaatccggctctcaccagccaaattatggtatcatccgcacgcgctaccatgcgccaacaacccggttgctacactctgattgagattccgattgcagacatgctttacggagaacgggaagaattgattaaacgcttggtataaaaaaataattcataacatcattatgactgataaattaaaagaagaaatccgcaaaacgcaagaagttctgaaaaacggaggcatcatactctatccgactgacacaatttggggattaggctgcgatgccacgaatgaagaggctgtcaagcgtatttatgaaattaaaaaacgttccgaccacaagtccatgctcgttcttttagaggatgcaggcaaaattgcatcgtatgctgacgtacctgatattgctcttgacctgatagaagtagcagataagcctacaaccatcatatatcccaatgccaaacgactagcccccagcctcatggcagaagatggcacaatcggcatccgcatcacgtgcgaagaattcacctcatccctgctccatcgcatcaaccgtccgctcgtatcgacttcggccaatattagcggagaaccctctccacgtttttacgatgaaataagtgaagaaatccgtaatgcagtagactatattgtagactaccgtcgcaacgacagacatccagcagccccatccagcatcataaaactaggtatgggcggagaaatagaaatcattagaaaataaatcagaaatatggcacttatattaaatattgacacctcaacagccgtttgttcggttgcactggcaaaagacggacaaaccattgccttgaaagaaaacaacgaaggcttgaaccactccgtattgctcggtacttacgtcaatgagattcttcaagaaaacaacttgacagttgcggccttagatgctgttgccgtcagtatgggccctggctcctatacaggtctgcgcataggagtatccatggcaaaaggactctgctatggtgccggcaaaccgctaatcgcagtcccgacattacaagcattagcattatccgtagccaaccaatatcaggaagaagttctctattgcccgatgattgatgctcggcgcatggaggtttacaccgcattttacaatcgttcaaaccatacggtcatagatacaaaagcggaaataatcgacgagaattcttttgccgaactacttgctacgaatgtaatatacttcttcggcaatgggagcgacaaaataaaaaatacgctgacctcacccaatgcccgttttattagcggaatagaaacctctgcccgtaatcttgctccgcttgcagagcaggcatggcaaaacaaacaatttgtggatgttgcctatttcgaacctttctatctaaaagattttgtagcaaccacacccaaaaagaaagttttataatccaccaaaaaacaagccgatgaaaacgaaaatattactgtttctattaacgatagccacactcggagcttgcaaaaaagaaacaagactcaccatcaaagaagtcaagaccacagaaacaaaatcccaatgggaaacacatttggaacattctgtattttctttcaaagaagctgccattgaaaagtcgtgcgttttattcaacgacgagatagaagggcttgtaaacggaataaatgcagccttcattgaacaatgtaaagaacagatagcaagccttgattctgccggaatcaaaacctccgggaaatatgagttatttatttccgatactgtctatatggctagcgacagatacatcagcgtattagtagaggcctacgagtattttggtggagccaatggaaacaccaactactatgctctgaattacgatatcaaaaacaataaattcatcacccacaatgatttgctagaccataataaaagccaagagatcaatgcactactgaaaacgtatctcaaagatccagatcattgctatacatttgaaaatccgagattggatatttgctctgctatcaactttacacccaatagtcttgaattcacttatggcaaatatatattaggtccgggtgcttgtggacctataacaatatctattcccttgaaaaaactcaatggaatggtgaaaatagctcttccataatttttttgaaaaaaaagcagtcaaaagtttgatagtatcaaaataagtactacttttgcacccgttatcgaaagagacggggcgtagcgcagtccggtagcgcatctgctttgggagcagagggtcgcaggttcgaatcctgtcaccccgactaaaataaactagaaaccagttttccgctgtgcggataactggttttcttttttacatacatacaaaccacaccacccgaccaaagcataaaaataaagacaataaaaaaagtcttcagaaactctgaagactttcaagggtggaagatcgggctcgaaccgacgaccttcggaaccacaatccgacgctctaacctactgagctacatccaccatttttgcttttgcgttgcaaagatagacataatatctcattctgcaaacaaatcagcaaaaaaatatgatattttttttctctaccgttctggagtcaattctattctccccgcttctatctcattagcagcatattccaattgttcataccattcttttccataacgctcaattaatgcatcgcgtaaaaaacagtaaactggggtaccttctttactaccttttacccttgcacaatggcaaatattccacttatgatagtttaaagcttcaaaatctccgtaatcagtaactcgaatagggtacagatgacaggatatcggttttcgaaaagctgattttccttgcgaccatgccttctcgatagcacaccaacaaattcccttctcctcaatagcatatgcacactctcctccatgaatcagaggcgtgcccaaatccccgtcactatcaaccacagcaaacccttgctccttgaccgcttctatcccctcaggcttcataaaaggacgaatcccttcataattcttctcaatctttcccggctcatcctcattcaatggtgctccggaatctccctcaatgcaacacgcccctttacactgctgaatatcgcaacagaattttttctcaaaaatatcaaaactgataagggtattttctatttgtatcatagcatacatattaaatgagcctcacccgaacagtgaggctcaaaatcaatcaatattctcaaagaaaattactttatcaaactcttgcctgtcatttcagccggttgcgacacacccataatctgcaacacagtaggagcaacatctgccaacactccgctacgcaattctttattttgagcatctgtcacccaaatacaaggtacaggattcaacgagtgggctgtattcggtgttccgtctgcattttctgcattatcggcatttccatgatcagcgataatcaatacatcatatccatttgctcgagctgctgtcacaactttctcaacacaactatcaacggtttccactgctttctgaatagctgcatacactccggtatgacctaccatatcaccgtttgcaaaattcaaacaaacaaaatcagcagacttggcattcaattgctcaactagtttttctgccacttccggagcagacatttcaggcttcaaatcataagtagccaccttaggagaaggaacaagaatacggctctcaccttcaaactgagcctcgcgtcctccattgaaaaagaaagtcacatgtgcatatttttcagtctcggcaatacgcaactgtttcaaccccgctttgctgataacctctcccaacgtgttttccacattttctttgttaaacaagatgtgcaacccctcaaatgtagcatcatacggagtcatacagcaataatacagaggcattgtatgcattccttgctctggcaggtcacgctgagtcaaagcaatagtcagttcctttgctcggtcattacggtaattgaagaatatcaccatatctcccggctcgataacacctaccggcttgttatcgcttcctacatgcacgatcggcttgatgaactcatcggtaattccctcatcataagactgctgaacagccatttccacatgctgagtcggagtgccgataccttcaactatcaaatcataagcctctttaatacgctcccaacgattatcacggtccatagcataataacgtcccacaaccgaagcaatacggcctgtagatctatccatgtgctctctcaattccttcaagaaacccaaaccgcttttcgggtctgtatcacggccatccataaagcaatgcacaaaagtcttttctatgccatattctttagaaatatcgcataatttcttcaaatgctccaaagagctgtgtacaccaccatcagaaaccaatcccataaaatgcacttgcttgttattatcacgggcataagtaaaagcttttacaatttcaggattctgcagaatagtgttttcacgacaagctttattgatacgtaccaaatcctggtctacaatacgacctgcaccaatattcaagtgacccacttcagaattacccatctggccgtcaggcaaaccgacattctcaccacaagtcaaaagagttgaatgaggatatttctccgtcaatgacgaaataaaaggagtcggtgtattgaaaatagcatcggcatggtcgtgtttacctattccccaaccatccaaaatcattaataaaactctattcatagctatattatttattgattatttttcttgtatgtaactaatcaacaaagttaactctttctctcaaattacaatagcgataaaaaactattgtctcaaatattttagcggaaacgtttgtatgtattacagcaatcggatatgagctccggctttccacacgaaagagcgaagatcggctccctctataatcgcagcctttactgcacagtccgaatataaggaaaaaacagaatccaataccggtaatattggcgcatcaatgcgaaaatcactactgctcctacatacgaaatcaggaacaaccaacccgccataaaattccaatccggctatttcacgaacttccccaccggtatctaccacctcaacacttccattatctccaaaaacaatatatccgttttttaccaatggataccccggccaataaatataatttgctgcaattttacgcatatcttccacaatttatcgacgtaatccctgtttcaaccgtttttctgtttccttagatatatatggacggaaaagctgattatcccacgcaactcctttaaactcctttaaattaattggtttttctttcttaccaggaacaaccttaccgtttttataaatcttgggtctctctttttccggcaccacctccatatagcgaatcaccaaatgagaataaacggaatctgcatattgcgaccatgtatatactcgcttcaccgtatccggagcaatcgtgatatttctcacatacaaagtatctttcttatcctctgacaaaaaatacgaagcaattcttctggctcggttcttcgaaatagaatcaaaacggagcgttgtgctgaatttatataatcctggtacaatactgtcaatggtaatcaccaccacagaatccaaagagatagtatctaatgccacggcatctatcttttgcgggaaataattgacagagtcatttgccttcaactccttcaccaccttatctgcagccgtcagctgcttgttcaaactatcaatgataaaatcatacatctgtgaaaactctttcgtctgtgctgaataaaaataaaggcacgaatcaaactcctctctggtaattccatatttcttgaaaagttcattataataagcataattctttttctcttcatgaccgtacatacctcttcccaccgccaatgtgccatccaccttatgcatatctaacaaaagccatttaaattcttccgaatctaaaggcatctcttttttcttgcaggaaaagacaagacacacaatcaatcccatcaacaaacccaaaacaattctccttatcataacgcattctttattttcttatacaactcagatgaaaaaataaaatcattcaaatatttattatcagaatgggctatcatattcttatcgccctcccattctttacggccttcatggataaaaacaattttctctccaatctcaaaaacagaattcatatcatgtgtattcaccaccgtagtcattttatattcatgagtgatttcactaatcagattgtctatcacaattgaagtcagcggatccaatccagaattcggttcatcacaaaataaatattttggactcaaaacaatggcccgtgcaatagctacacgctttttcataccaccactgatttctgacggataaagccgctcggcattatgcaaatctacacgattcagacaaaaaaccgcccgttcaattttttctttctccgaatattcagaaaaaagattcaaagggaacatcacgttttccagtacagtcaatgaatcaaacaatgcccctccttgaaaaacaaccccaatttcttttctgaaattcttcagctgcttggcatccattgccgccaaatcccggtcgtcataataaatatggccatggtcaattgtatgcaaagcaatcagcgatttcaacaaaacggtttttccggagccactctttccgataatcaaattgacctttccggcttcaaaagaaacatttatatcagatagaacctttttactttcaaaagatttatccagcgattcaactctaatcattacaacataatttgcgttaatatcaaattagccgtcaagatggcaatactgctatctaccactgcttttgtccctgccttaccgacttccaaggctcctccctgcacataatacccataaaaagcaggtatagaggtaaaaataaaagcaaagaacagactcttcacaatagaataagtcacataataaggattaaaagtaaaatgtaatccatatacaaaatcctcaaaattcacgacaccgctcaccaagccggatatcaatccgcccaatatgccgataaaaacactgaaaatataaaggatcggatttatcacaaaagaagcaatgattttcggtccgaccagatatgccactgagttaacccccattgtttccaacgcttctatctgctccgtaatcctcatacttcctatttccgaagcgatattactaccgattttcccagccaatattaaactcacaatcgttgatgaaaactccagcaacattgtttcacgggtcagatacccgatcagataccgtggcaacaacggactctgcatattataggctgtttgcaaagtcagcactgccccgataaaaaaagatattatcaccaccaatgcaatagagttcagacccaatttttcaaactccaatatcaactcccggatatagacctttttcttctcaggacgtccaaatgcccttcggataaaaatgatatataaacctaatttagttaaaaacttcatatcctcttccaattacagaaaatcaaggtaaaagtataaattataattggacttttcccatttcctattcaaaaaaacagtatatttggtatatcttttgaagtagagatacgagatgtaaaactaaaacaatatcattcgaatgaaccacaatacatattgcgttattatggcaggcggtatcggtaatcgtttttggccagtcagcaaccgccgttgcccaaaacaattttcagacattctgcactctggcaaaagttttatacggcaaacctacgaacgcatctcacaaatatttccagacaaccatattttcattgtcaccggaaaagaatacgaagaaatcacccacaaacaaattccggaaataccgacagaaaacatactcaaagaaccatatgtacggaatactgccacttgtattgcctatgctgcctacaaaattagaggcatcaatccggatgccatcatggtaaccattccttccgaccatttcatcagcaatgattatgcatatctacaggacctgcaggaaggtatgcgctttgcttctgatcatggcggtttgctcacaatcggtattaccccaacccgcgcagagaccgaatatggctacattcaggtaaaatccaaagacaacacacaaaaaatatctgctgtcaaaacatttacagaaaaaccaagtgccgaaatggcccaaatgttttacgattctgatgaatttctatggaatgccggaatatttatctggtgcatcaaagatattatagaagagtttaaaacacacatgtacgacctacatgccctattcacgacagacagcaaactgaacaccccgtcagaaccctccttcattcaaagtgtctacggacaatgtcacaacacctccattgatgtaggcattatggaaaaatcgcagcatgtatatgtgctgaaaggacattttggatggtcggatgtcggcacctggcacgcattccatgcattatgcgacaaagacgaacataataatgtctccaactctggcaaagtcattttaaacgaatcaaataactgcattgtcaacattcctccccgtaaaaatgttgtaatacaaggagtagacaacctgattatcgctgaaaaagataactacttcatgatatgcaaccggaaggatgaagaaaaaattaaacgttttgaaaaattctttcgtaggaaacaataactacctaccaccaataaaaatgcgcccggagctatcggttctccgggcgcatttttataatcatcaaaactaatcatactgaaactttcacctcttctatacgcgcattcttcactcgcaaaattgtaaaagtaacatctcccatttctatcacttctccctcttgtggaatactttgattaaagtacagaatcaatcccgccaacgtttcatactcctcacgttcttcaagctccagacgatatttttcattcagatagtccacttccagacgacctgaaaatatatattcatgcggagaaagcatctcctctttcaaattcagatgatcatgttcgtcctcaatctctccaaaaatctcttccataatatcttctgtcgtcacaatacctgcagtcacaccaaattcatccaccaccactgcaatacttttctgatctttaaaaaagagattcagcaaacgctgagcagccatagtttccggcacaatcaacaccttgctcaacgccttactgattgtcggcggattgtgaaacaaagcagaaatatggacatatccgatgatatcgtctatactttccttataaatcaatattcgcgacagccctgtcttgataaacaactgagacaactcttctatcgaactgtcaatagacaatgctaccacatccggacgcggcacaatacattccctcaatttcacttcagaaaaatccaaggcatttctgaacaacttaatttcatggacttcctcctcctcttgcgctccggtctctccttcttcaatcaaattatttaaatcaatctttccgaaagcacggttttcctctttattttccagtttcttgccggtaaacaaacgcaacaaaataccacccaaccatacagaaaaataagacaacggaaaaaagagcaaataaaacagaaacaccggaacagcaaaaatcttcaagaaaagattagagcgtaaacggaatactgttttaggcaaaaactctgcaaaaacaagtataattaaagttgaaataaccgtttccacaaacaactccgcaccaacagataaattcaggaatgcaaggttctgcaataacaattcagacataaaaataccataaattaccatcacgacattattgcccaccaaaatagtagtaatatacattccggaatttgaaacaaacaaatcaatcaaagcttgcgaaacacctttattcgatttatcaatctcaattctcaacttatttgaagtcaagaaagcgatctccatccctgagaagaatgcagacaacagcagacaaactaatatgataatcaatgaagtggtcattggatattcttattttcaatttcaacttttccggtaataccgtaaaacatcggattattcaaatcttggtcagacttaaatcctttgtgtccttcaatcacttgctctccggatatcagtttcacatacctgtcagaatagattatctgcttctcaacatcccaatacaacaactctgtttccaattttttaccctcagcattcactacaaccacttcactcctggcttcccacagattcttatcttcaagtttcttggcatatttacatttaatcgaccccattaacttaccctccttatcataagaaatcgcatacagtcctttcggaaactcctcatacttttcttctccctcagtcattttgatatattcggaagttatcactttatacttaatccgagcagaatccgaatatatcatctccaattcatgtccggtcatttcaggacgtgcttcaccgccagcaatacgattaacatcctgcacatcatttttacaagacaaaagcattattgtccccaacaggacaataatgcttcgaaaatttatcatactcgaaaatatatatctcatttatttcaattcctatttcgagaaacgggctttagttgtttcattaatccaatcaccaatcttaacatctgcaccttccgtcacgcttctaaagaaagcctcatccttactggggaagtgcggagtataagaagtaatcaacttattcgcttcttcagcaacactcggatcaacctgtttcgctttattaaatttatctacagcagcccagaacacagatgcatggtcaaaagcatcctctccataattatttgcataagcagcataagccttaccaatcaaaatataggcagcaccattctgtgcattacactgaatagctgccaaagcagcacgcttagcttctgcatattgtttcttggccaatttcaactgagcctgacgcatacaataatcgcctttggctgtttcatcttctgctttcgaaatagcttcctgcaaataagtgtcagctttatcccaatcctgacgtttcataaacattgtagccaagctatatgcagcttctgctgaaggatccaatttatacaactgctctgcaacagtagtatataaagccaaatactcacactcgttccgacgcagcaaactaaccacagatctgatattttcaacatcttccggagcagcattatacttctctgtcagcagacgattcaatgtctcgcaatctgcagctcctgaactgaaaaacataccgtcaatacgacctttcatagccttaaaaggttccggtttcttggcatgtttcaaagctctgtcaacaaaagcagatactttcatatactggttaatatattcatcacgagacaccatatcctttttcatcaagtctcctgccgcaaagaacaatacttgaacagtaatcggatggctcttgtttccctccatctcgaaagatttattcaaatatccgtaagcctctttcaactcttcatcattctccacacccaactgaatcagtgtagctccttttttacctaaaatatagccttctccaaatcggggattaatataactatattgtacccactggtcataaaccattttcaaagaatcgatataagcacgatcctttgtctgcttgtacaaacctgcaaataaatcctcgcctttcgtataggtcaatgtctgaaaagcaggagcattgtggaaaacataactccatgccggcagagcttctttataattcttctgttttaaaaattcagaataaatagatgcgctctctatcgttttcacactgtccacaccatattttgactgtacggtctgagcctttgcagcgccaccaatcaagcaaaccccgcatgctaaagcaacaattttcttcatgattttatttttaagttttgtatagtttatctataattcatccaaggcaaaaatatcactaattttctaaaatagccaatatagcacatgaattttcatgtctgcttatatttttttagcaaacgccaatatctcattcaatccaagaaaacccaatattctacaaaactcgactttgtttggcagctttttctccagaaatatactattaccgccggtcacaatcactcgtccatcgtcaaacgtttccatgaactcatgtatataatttttcacttcaaaaagcatgccattcataactccattccgaatagcctcatccgttgtctgccccatccccccatagttcagcgaaggctccaccaaaggtaatttggctgtaaaatgttgcaatcctcgaaaacgcatatccacccccggagatatattcccacctaaaaacgttccttccgcatctacataattaaaggtaatacaagtcccggaatcaatcaccagcaaagggtgtccgggatattttcccatcgctccggtacaaatcgcaatcctgtcaaaacccaatgtagccggggtggcatatccgattttcagaggcaagggcatcagagaagaagcctcaacccaccagtcaacagcccctttcaacatatccctcatatcatcaggaatcttaccactgcccgacagcaacagatccacccgttcacccattccccgatatctgcctatatcttccaacagactgtccccgcaatatttagcctccaccaattgattatctttaaaaaaagcatatttcatacgagtattccccgcatctaccaccaaattcataacacactgtcttttaaatttctgacaatttccgccattcggctttcatccttcacgtccgtaaatataagtgacaatttatcattcttctcactaaaacggcaagccaccgtctgctgttgcacaaacttcaagacattggcaaatacatccgatttataaaacggagacgactggtcgctcacaaaatacatggtcatcttaccatttttcgccaacaagcgctccacaccaagcgacatacaccaccttctgacacgcacaatatccatcagacctaacacctgtctcggcaactcgccaaaacggtctgacaattctctggcaaacttctccaagccctcctcatccggaatattatccaattcccgatacaaacggatacgctcactcacattttccacatacgaatccggaatcaaagcctcaaaatccgattccaccacacaatccgccacaaacacccgatcattgtctccacggtcggcagccagttccgggaattcctcgtctttcaactccaacagagcctcgttcagaatgcgctggtacgtttcataaccgatttctgcaataaaaccggactgttccgcacccaaaatatttccggcaccacggatatccaaatcctgcatggcaatattaaaaccgctacccaaaccgctgaaatcctcaatagccttcagtcttctccgagcttccggattcaccatatccaacggaggtgtcagcaaataacagaacgcctttttattagaacggcccacacgtcctctcaactggtgcaaatcactcaagccataattttgagcctgattgataatcatcgtatttgcattcggaatatccaaccccgactcgataattgtcgttgcaatcaacacatcataatctcccctcacaaaatcgtgcatcaccttctccagctcctctcctgtcatctgtccatgagcgacacaactcttcacctccggcactatccgctgtaacataccctggatatcacgtatagtttccacccgattatgaataaagaacacctgtcctccgcgcgacatctcatacataatcacctctttaatcaactgctcgtcaaaccggtgcaattccgtcacaatcggatacctgttaggcggcggagtccggataatcgacatatcccgggcacccatcagcgaaaactgcaacgtacgcggaataggcgttgctgtcaatgtcaaggtatccacattcaacttcatttgcttcaacttctcctttactcccactccgaacttctgctcctcatcaataatcaacagccccaaatccttaaactccacatccttgctggtcaaacgatgagtacctactataatatctacctttccttctttcaactctttcaacaccttcttgatatcgctgcttttcttcatccgactgacatactccaccctgcatggcattccttccagtcgcttcgaaaatgtgatataatgctgatatgccaacaccgtcgtaggcaccaacacagccacctgcttgttatccgccaccgctttaaaagccgcccggatagccacctccgttttaccgaatcccacatcgccacacaccaaacggtccatcacctgcggctgctccatatctgcctttacggcattaatcgccttcagctgatccggtgtctcgtcatacataaacgacacctccatctcctcctgcaaataactgtccttggaaaaagcaaaggcaggctccttcttcctacgggcatacaacgcaatcaactcgcgcgcaatatccttaacccgcgactttgtcttctgcttcaacttgttccaagcctcaccacctaacttattcaccgtcggaggcaccccgtccttccctttgtattttgaaatcttatgcagagaatgcaaccctacatacaattccgaattattcttatacaccagacggatagcctcttgctccttaccatcattcatcagcttcaccaaaccgccaaaccgtccgattccatgatcaatatgcactacataatctcccggatgcaaattctgcaactcactcaacgtaatcgactcacgtccctgacgcaaacgcgtagtctgtaatttatacttgtgataacgatcgaaaatctgatgttccgtatagacacacaacttttccttcgcatccgaaaatccctcatgcaacacaccttccacccactcaaactccaatccataccctttatccttgaaaatatcccgaatacgctgaatctgcatctcattgttagagcaaatataaagctcgtatccgttcgccttacgcgattgcaaagtctccgccagcaaatcaaagtgcttgttcgtaggcggctgcgcctcacaccccacttcaataacctctcccctgaaatataaatcaggtccccattccaccacagggcactcttccatatatttcaacaaatcttccgcacaccctatcaactcatctccaacctcttcgtgcaatttcctcaccttatcgtgcaaaaacaaaccattctttacccaccaaaccggtttctccgcaaaataggtaaacaaatccgtatgtttaaaactcccgctttccgaatgtccgctcaaatccggcacaatagacacctgctccaccttccggtcggacaactgcgtttccacatcgaaaaagcgaatagaatccacctcatcaccaaaaaaatcgatgcgggcaggcagttcctctgcaaaagaatagacatccacaatactgccccgaatagaaaactgtcccggctcataaacgaaatcactccgttcaaatccatactctaccaaaagattctccacaaacgacatggaaatcttatcaccacgcttcaccaccatcgacatcttccccagcacctgtctatccaccacccgttctaccaaagcctcagggaaagtgaccagtgtatccacaatcccgttgctgatattattcagcacctccgttctcaccaacaccgaatcattatccttctcctcgtccttaatcatccttcgataagaagaaggtaaaaacgccacctttttctcatccgtaaaggtaatcaaatcattatagaaataggcagcttcctcccggtcgttcaacaccaccacccgcaccccgggtctgcttaccctcatggcaccaatcaacagcggagtgaccgacccggcattttccaccaacttaaacttcttgtcgccagccgcagtcagctttgccgtcaaacgctcgatcacctttgccgacaaatatttttgcaataaatcctttgtattcaaagtattcaaacttaatatttaatatcgccgcaaaagtaagtcatttccaccgtaaaaccaatcgatatcaccatctaaaccctcggaatatttcttagccgctatcatacgtggtgtcagttgattattttaaatcaatactgtatgtcaatactcaccattataatcatatacttgaaatttaccaccaacataaaaatatacaagagaatccttttctacaacatcaaaatcatataatcgtgagtattcctccggacctcttcctttgtgatttattttatttaaaaatcgtccttgccggtcaaaaacaagaatcccattagcaatcctatcctctacaaatatccgactattcgttacaacaacccgagaaatacttccaacaagagaactatccgttgtttcaaaaggaacatactgtacaaaatctatataatcagacagcttccctttttttaaatcagacatcacctgaaaagaagggacatctaatttagcccccctttttctacaaacctattatttaaaacaaactccttacaattcctttaaataagaagatacatcatagcaatatactttttcatcgctagtcaacccatataaacacttattataagcatcaactctaaagaacataatattttctcgaataataaacttcgctacaggattggcattccaatcaaaaatgtgaatttcctcatacccgaaatgatatcttcggtctttttccggctgattgacatacaatgcgtaaacatattgatcagttgcatcactacacgaataatataaaattctttcttcacgctccgttgctgatatttgatcaatagattccggtttatggtaaattgcaacaattttcatatcagaaaaatcagcattgaaaatacagatataatttgtccaccaaccgatatttgccaccttactattatccggttttaaacaagggggcatagacgcagtagctattttatcagttgctaaatctcgagaaaacattttattagcattgataaccttctttgtttttaaatcatatcttgtatattcaacattattatttcttttgataaaaccaaacatcaaattatctcgccctggcagccaaactccatccgataatactccttgaagtttatatgcagtatcaataaccgtttgcttttgcttaaccgactgtgtaatattccattcataattcatcacatcatttgacaaccaagccttcacctgaccatcatccgttttgtaagcagaagaataattgacggcataaaactcattgggtcctctgcctataggtataaaagaccccaaaagctcaaaatcggatgtcgaaaaaacatgaaagtaacccttttcactcataggagtataggctatcagaaaagtatctacacaatacaaatctacacatcctaatacatccagttggatactatcacctttcaattcatgcgtttcagggaaaactgtaactacaatttctttattatcaaataatccctttgaattacatgataacaaaacaaaaaacataaacagtatgtagattattctcatatcaactattttaataaaaattcattatgtccacttgccttgaaagctataagaaaggtaatatctaacttttcactttgtggtaatacatatttcataatttaattctttatatgcaaaatctgaaaatgcaaatcataatcatcatcttcagaactaatctatactactatcatagcgatcatagtaagaaatttcgtcatcagaataaattttatccaaacaaatgtctgttattccaatatattcgcccggttctcttccatatttagctatattacaatacaaatgattattcagataaacacatacaccattacaacctcttcccactaatatggtataagcagtatcggtgtaccttcatcaggagattctgctaatttatcttttatcatctgcgttattggagataatcttttcgcatcctcactgcattgatatggatacaacacacacatatttatccacaaacacctccaattgattattcttcgggaatattgttctcttgctgtcgtctgaaaatctctttttgcaattctatctcttctttcaattggtcaattgatggcagataagttaaatagcgtgcttgaaataaacgctcattatcgtgcaaaacggagtaacgagccatatcttcgcttgtttcagaacaaaggattaatccgatagtcgggttatcaccctctgttcgtttaagactatcgtacattcttacatacatatccatctgcccgacatcctgatgagtaattcttgatgttttaaggtctaccagtaagaagcatttgaggatataattgtagaaaaccaagtctataaaataatctcccatatcagttttgatatgctgctgacgagctacaaaagcatatcccttacctaattccattacgaacttttggatatgtgtaataattgatgtctctaatttggtttcagaaaaatcggaatttggggataaccctaaaaactctgcaacaactgggttcttgataaactccaatttatctcgctgatacggttcagtaatttgctccatttcctctttgactatctgcttattttgcgattgcaaaagacgatagtaatattgagatgctatgttcctatcaagtgttcttgcactccacacctcatttatagattcacacaaataccaatctctggcatttttatctgtcactcttaatagtgttctataatgagtccaagagagtattgatgattttccacgcagtgagtggaaaatttcgggaaagaacttatagaactggacaaactgatagagattgcttttcgtgaatccctttccatacaagtttgtaagataattggcaagactttttatgacctccttaccatactcggctctattatcgccctgcaattcttcatccacaatacgcttacccaacaaccaattacgctgtaccatagccacattaacggcttggtatgcgtaattgcgtgtttgttcaatgatattctgtgcatctttgaaaatatcaccagtaccgccagcctttaatatctcaaaatcctgtttcatattgcaaagatatataattttgtcgagatgagacacttacaatagagataatattaacatactgaatcggttgcttgtcttcagataaaatcctaccctttatttgaccttctacaggcaatacaaataacaaacagaaaattaaaacagcatacttcattttaatctaaaaattcatgatggtcatacactatcaattgattgtttttattattgcaagacactatcaacagtcctgacaacaataaaacatatatacaaaaaacactcactttcataccatattacatcttaaaccttatcttgacaagcaagggattcatcgagttttcactatcaagaaacaatttttccttttggataagatatttcttcaaaggctccatgttatcagggagtgagtctgctgtataatcaccgtaatcattgaatactgcataataaaattgagcatcagaagcctttatcaacaatagaggcgttttatcctttttgtcatgcagccaatgcaatcctttcatggtagttttatcaaaaacaaaaaaatggtcatcagcctccggacctcctgctgaaaagtaaaaatcccgttctgtttcatgcaggtaaacaggcaatttacaatacgaattatttataaacttctgtacatcgaatcgatgttctgccgttaccggcacatatcggtacggtatgtatttatctttaaaatccaactgataaacaggcttgacataaccggaatccaggcaatagcaaatattatccccttcctgcggtcggatccaataagagttattaatcccctgtgtcatgacagataccggcaagacatactctttacggggcagataagattttaaatatttcccgtttttatcaaactgagtcaaacaataaaatgtattttcaaaatcttccttttgaaacggattgcaaccaaaaaggaaaaaaccaccatcgcaagatggcgcaatacctatgcaattcggatatttctccgggaattgaggcgtagtcttccttaaaaaacgcccatcaagcagcgaataatgcaatacgtcattattgcagtctaccgccaaaatttcccgaccagccaaatcaagacatatatcgtacaactgtaggtattcccccggagcacgaccaatctgtcctaccgtgaataaaaaatcccctgctgaatcaaataccattatacctgtagaagtccatagaaccatcttcccggattctgcaatcaatattttttgaatactcgcaatatacgactgctctgatgtttccaatggaattatcgcaatgctatctatataatccgtaaaatccgataccaaccgggtatcttccaaaggatagaatactgctgtctgattttcatttttatcccgacgcatggagcaagacaaaaggactgtcagtaatacaaaaactataaatgcatatttcatatttacttctttgtacaaaattttacaatacaaatatatactattcatttaaaaacatggaagaaaaaacattctattttcttctttcaagcgttaaacagttgtattttatcatctatacagaacaaaggtataaattgaagcacagataaccctactacatttattgtaaaataattgtaattattttagttgtaaaaaacaaatctatttccacaattttaattactatatttgtctaccaatatttgaaataattttcccatagacatgatattaaaacatagtctcaaatctatcatcagcattatcattataatctttatcctactatggattaatcaattctttgccataaaatcaatatatcaatctgaaaaattacaatggcagaaactgatggattcagtagttgctcatagtattgattcatatgtccgaccttatgatatgctatattcatacgatcctcttcactctaatacagtctcgtttaatccggataatcaaaccataacaattttgagaaatcaagttcggtatgacttcaaaaccgattcaaccgaaatgcaggaagagcttatactgagagctatgtatgaattacgtgtcaatgatttagctccacttaaacaattggatagtatattacatactaatgctgctttttgttctaagcatatcaattttgtcattcataaaagcgacagcttaaataatgttatagaccggtttccaagtctacaagtaaatatatcaaatatgatttcgtcaaaaagttatatactaggtttcattgacggcgagtctttgcagatatattacaattttccttttctgatatttttaaaggataactggaatagcttattgacaatatgcattatcacattgttattcattcttcttatgatagggattgtttatctatttagttttatgcggatgttatctaaatatcaagaagatatgatgtataaaattattcatgactggaaaactcctttgaatagcgttaaagccatgacagaactacttcaaaggaaatcaatatcccctgaagacaaaaaaggtcaggataaaatccaatttatttttcaggaaatagaacacctacaaaatggttcgcaggaagtcatgaaaacactgtttgcatctacaagcattcagttagacaaaatagaatttgatttaaaaaaagggcttctctccttgattcaagaagagcaggctgcaaatcctaacaaagttattcatttcgatttacaatatttattgccgagttctgttgtctatgcttcacaatttcatctaatatgtgctatccgtaatttacttgacaatgctatcaagtatggaaaagaaagtccgtctatttctattaaatgtttccaagaagataaatctcttgtaatcaaagtaatagatgatggtcctggaatacccaaagaaaaacaaaaatttatctttgataaatactatcgaataacagaaaaggatgccggtaaaagtaatgtaggttatggtcttggtttacattatgtctattccgtaattaaattgcataaaggaatcatcaaaataaacagtacccccgaaaatggatgtatatttacaattaaaataagaaaatggacaaaaaaataaaaatactatatgctgaagacaatgcaacaactgcactgatttactcggagatattggaagatgcggggttttccatcgaaatagcaaaagatggaaatgaagcatgggatttatatcaacacagaatatgggatcttatattacttgacatggatattccaggtaaagatggacatgagctaatccgtcttattcgagaaaatggaggagaagttccaattattattctcagttctcttaatcacaatcatgctctctatgaaggtgccgatgactatttagtaaaaggatgcagtatagatgaagtaaaagcccgtattgacaaagctattgccagagtgcaaaaaagcgtcatgaaaaaaaacaatggtttattctacatttcaccattcgttaccttcaacaaaagcacccggcaactcactattaaaggcaaaaaagaagaattaaaaagcatggaaagccgtattctttggctgttttgcattcgaatcaatgaaacagtcacttatacagaaatgtgtgaaaatttgtggggttttcattctacagacaaagagaaatcactcacccgctacatttgtttgcttaataaaaagctaacatctattccaacagtctatatacaaaatgactttggtataggctataaactagtaagcgagtgacagcataaaaccaatcatactctgccaaatcttcaaaatttcatacgatttggcaaattatacagataatttgcactatatttgtaaaaacaaaattcaacagttatgctaattggacgaaaagaagaacagaaaagattgctttcggcagcacaatcggagtattctgagttaatagcagtctatggtcgcaggcgtgtaggcaagacatttcttatccgtgaaacttttggctataaattcacattccagcatacggggttggccaatgccagaaccaaagaccaactgtttagttttgccatttcacttcgtgatgccggttacgatgattgcccgacaccacaatcgtggttggaggcattcaatctgctatctcactttctgaaaaacgcaacagataagaagaaaatcatcttccttgacgagcttccttggatggacactccgcgttccaacttcatttcggcatttgaacacttctggaatggctgggcatctgctcgcagggatatcgttttgattatctgcggctctgcaacatcgtggattatcaataaggtgattaacgaccatggcggacttcataatcgtgttacacagcgcattgctcttcaaccgtttacattgaaagagtgcgaaatgtttgcccaaagcagagagttcgaaatgagccgctaccaaatagctgaatgctatatgatactgggaggcatacctttttattggaacttgctggaaaagggacttggtcttgctcaaaatatcgataaaattttctttgacaaaaccggcaaattagcaaatgaattcaacctgctttatgcttcgttgtttaaatcaccagaaaaatacattgatgtcgtaactgcccttggcaaaaaaaaggctggcatgactcgcgaagaaatcataacagccatagacaagtcaagcaatggtgcattgagtaaggtgcttgatgaattagaatactgcggatttatacggaaatacaatggctatggcaaaaagacaaagcaggctatctaccaattaatagacaactatacgctcttttatttcaaatttatccggcaaaacaaaaacaacgatgagcatttttggtctgcatctatagattccgccatgcatcgtgcatggagcggtttggcttttgagcgtctgtgtttggctcatacacaacaaatcaaggcaggtctaggcatttccggggtattgagtaacatctactcatggcgaaaagaggcagatgaaaacggcgaaggagcacaaattgatttattgattgaccgcaacgatcaagtagtaaatatctgcgaaatgaaatattcgttgtcagaattttcaatcaatgctgaatatgaacgcaatctgcgcaataaaaagagtgcattcattgaagcaacgaatacccgcaaggctgtgcatcttacgatggtaacaacctacggcattcgccggaactctcactccgaaatcgtgcaaaatgagataacattagaggatctgtttgcataaagcaacaacaactgtatgcgaaagtcataaaaccttccgaaaagggagaccgataattttcgctattcggagaccgaacaaattatctatttctcccaacgacctcttacatacctcccaccggggtctcactcccctctcacctttctccgttcctcccccgaagttcctccgaagctcatccgaacgaaaagccggaagcaacgaaggagcttcggtggaagaagcggaaaaggcaaaggataagcaaaagacaggaaataaaaaagaggacatttcccatgccctctcatacgataaagattaccctattttatccggtttctttttacccggttcaacaggtttggctatagattcgcgcatttgggtatcggcttcaatatttttcatccggtaatagtccattacgcctaaattacctgaacggaatgcctccgacatggcaagaggtatgttggcttcagcctctatcaccttagctttcatctcctgtgccaaagctttcatctcctgctcgcgagccacagccatggcacgacgctcttcggcttttgcctgcgcaattttcaaatcggcttccgcctgatctatctgcaaaccggctccgatgtttttacccacatcaatatctgcaatatcaatggagaggatttcaaatgccgtaccggaatcaagtcctttgtccaataccactttcgaaataaaatcaggattttccattacggctttatgggattcggatgaaccgatggaggagacgattccttctcctacacgcgccagaacagtctcttcaccggcacctcccaccaaacgcttgatgttggcacgtacagtcacacgagccttggctatcaactgaataccatcctttgcaacggctgtcaccggcggggtattgataactttcggatttacactcatctgcaccgcttcgaagacatcacgccccgccaaatcaacggctgtcgcaatctggaaggtcaaatcaatattggctttggaggctgacaccaatgcatgcaccacctgcggcacatgtcctcctgccagataatgggcttcgagcatatcccgataaagctcgataccggcttttttaccttcaatcatcgcgccgacaatgacggtgggcggcactttacgccaacgcatcaataccagttgcaacaacgatattttcacatcagataccaatgcctgaaaccataaacctatgggaataaaataaaggataatccaaagcaggaaaagtcctcccgcaacggctacactcaaaaatacaatacttgcgttttccatgttcagtttgatttagattttactatgattttgtttcgcaatactttcactacttcgaccgaccggttggcatctatatatcccgatatggattcagcttcaaccaaggcttcccctacccgcacatttcccatcggagccaagcgccccatagtggttcccgtgtccccgacatgaactgacgaatccactccttcgaccgtagcatccactctggtgtcaagactgagacgtttccaagtggaggaacgcagggcataccaggtgactcctgcacaaaacacaaccgtaccgcccaagatatagtgtccggccggcatcccatagaaactatatccaaaatacagacccactataatacaaacaaagcccagtattcccgcaacattaactccggggaaaaccaaaaactccaatatcaccagcaccaaccctatcagtatcaacataaatactatcagccattccataacgtatgattatcaatatagaggataaagatatgaaaatacttccgaatttcaatacttattatttactttgtagcgttttttatatataaaggaatataccatggagtttgaaggacattctgaggagtcgttttattacaaggaagagcatttcagcccggaacggactgaaaaattgagttaccattatcgcgaaatcctcaaattactgggcgaagacgttgaacgtgaaggtctgttgcagacccctatgcgtgtagcaaaagccatgcagtttctgacacagggctatcaacagaatccggaagaaattctgcgttcggctctgtttaaagaagactatcggcaaatggtgattgtaaaggacattgaaatatactcgatgtgcgaacaccacatgttgccttttgtaggccgggctcacgttgcctatattcccaacggacatatcacaggcctcagtaaaattgcacgtgtagtggatgcctatgcacgacggctacaagtgcaggagagactgactcagcaaatcaaggactgtatcgaaaatacgctgcacccattgggcgtggctgtagtcatcgaagcccagcatttttgtatgatgatgagaggcgtacagaaacaaaattccgtcaccaccacgtcggatttcagcggagcatttgaaaaacttgccacccgcgaagaatttatccgcctcatcagtgccaaattgcgataatccaagattacgaaaaatcaaacgcgggcaaccgcattaaacaataaaatactatgaagaaagcatttgtatttcccggacagggagcacaatttgtgggaatgggaaaagagttgtacgaaacttctcccagagccaaagaattatttgaaaaagccaatgatattttaggtttccgcatcaccgacctgatgtttgcaggaactgacgaagatttgaaacagaccaaagttacccaaccggctattttcttgcattcagtgattttggctgacagcctgactgaaacgccggacatggtggccggtcactcactgggagaattttcagctctcgttgctgcaaaagcactctcgtttgaagacggtctgcgcctggttcatgcacgtgccttggctatgcaaaaggcttgtgaagccaacccgtcgacaatggctgccgttatcggaatggctgacgagaaagtggaagaaatctgcaattctattgacgaagtggtggttccggccaactacaactgcaaaggtcagattgtcatttccggaagcaacaaaggcattgaacttgcctgccagaaattgtctgaagcaggtgccaaaagagtgttgccgctgaaagtgggcggtgcgttccactctccgctgatggaaccggctcgtcaggaactggaagctgctatcaagaatacaaaattctctgttccggtgtacccaatctaccagaatgtcgatgcacagccctatacggatccagccaagattcaggaaaacctgattgcacagctgactgcatctgtaagatggacccaaatcatgcagaatatgattgctgacggagcgacttcgttcctggaaatcggtccgggcaaggtgttgcagggattgctgaaaaaagcaagcactgaaatcgaaaccagcggaatccaataatacagagcaagctgaaatattctaagagctgattgagccggcaagaattccacttgctgattcagtcaactcttttttttgtcttttcatttttttgctaaaagtaattttgtatctttatccctgataatttgtatttttttcatatgccaaacagaaaactcaaacgacatttaaacataggcttcagatggctgactatcctcataatctgtacagtcacagtctatctgtttcctcgaggaggcagttttcaatacgaatatcagaaaggaatgcagtggcgctatgaaacgctgtatgctccattcagttttccgatacataaaacagaagaggagctgcaacaggaacgtgaaaaaatcaatgaagagcaacagcctattttcaaacgcaacgcccagaccggaagcaatcaagtggaaaagttccgctcggctctccatactttcgataacccggaaaaccatgcgaaactgggaaaacttacaaaaaaactggaatccatttacacggccggcattttgcaacttccggagggcatgaacgcagagaaaatcaagcgtgtacaaatcatttcaaacaatctggcagaaacggtaaaattcagcgatatctataccctgaaaaaagcttatactaccttgagcgagggaataagccacagcactctaccacaggcagtcaaggagaagattctcagtctgaatctgaacaactacctgcaaccgaatctggactttgaccttgccaaaaccacccaggcgcaaatggctaccctcaaaggtatcagcctgacacagggaatggtgcaaaaaggcgatgtcattatcagcaaacgcgagctggtaacacctgaaaaaatcaagctgctgaattctctcaaaattgaataccagaacaatctgggatcgacagagacttatagccgtatcatcggcggacagttcttgctcgtattgattgcgttgattgtgttttcaacctttttctactactccaagaagaggatattctacaataaccgggagtttatttttctgtatggtctttttttggcgaccattttattaggcagcataggctatcaccaaagcatcaacatgtttgccattccggtattgttttttaccatcattgtcaacattctgattggcagccgttctgcgctgtacctattgttgggaacgactttgctggtatcttactacgcacccaacagctacatgtatgcctttatgcaggtggcagccggaatcgtagccattttcagtctgacacacctgcaacgcagaggacagctgtttatctctatcctactgacattcattacatacgcattggtgtatacggcattcattctcactcaggaaggagaaatacgtgtcacccacatgttcggctacctgtggctgtttatcaacagcatgctcttgatgctcacttatccggtgatttatatttttgagcgtatattcggctatacttcagaaatcaccttgatagaactatccaatccgaaccatccggccttacgcaatctgacaaagaaagctcccggcacgttccaacattcgctgatggtggccaacctggcagaggaagccatttaccgtattggcggcaatcctctgctgacaagaaccggagctctctatcatgatatcggcaagacctacgagcctttctttttcattgaaaaccaagcaggaggcatgaatccgcacagcaattgcgaatttgacgaaagcgcccaacatatcatcaaccacgtcacgaaaggcgtggagatggcaaaaaaatacaatctgccggaatgtatcatcaactttatccgcactcaccacgggaaaagcaaagtgaaatatttctacaattcctttaagaacaagtatccggacaaggaaattgacgaatctctgttcacttatgccggcccggaccccgttacccgggaatgtgccgtagtgatgatggcagacgctgtagaggctgtatcacgcaccttgacagagaagacagaagagaacattgcacaggcagtaaacaacatcatcaacggacaggttcaagacggccgtttcgtgaatgcagacattacgtttaaggatattgccactgtaaaacaggtatttattgaaatgctaactaatatataccactccagaatagcctatcctaaactggagaaaaaagaagacaagtaacacaaactcacaggcacatgacacagaaagctattacaatcaaagatttggcagagagattgaacatctctgtttcaacggtatcccgcgcactgaaggacaatccggaaatcagccaacagacacgcaaaacggttcaaaatttagcaaaagaattgggatacaagcccaatcctatcgctgttgctttaaagacacataaaagcaatacgattggtgtcgttgttccgcaaatcgtcaataccttcttcgccaatgtcgtaaaaagcattgagggagttgcagacaaatatggatataatgtattggtcagttcttcgaatgaaagttttgaaaaagagaaaaagaacatcgacatatttctggcaaaccgctgcgacggaattatcctgtccatttcaaagacaaccacatcgtatgagcatatccaaaacatcctgacttcgggaatacccctggtgctttttgaccgtaccgccaaagagctggaggtatccaaagttgtggcagacgatgcagaagctgcctacaaaatcgtgcagcacctgattcacggcggagcccgcaaaattgccctattgacaggtccgggacatctctccatcggtaaaaaccgcatgaaaggctatttaaaagccatgacccagaacaaattggaaatagatacgaatcttatcgtgagatgtgaagatttcacagtaaaatcagccaagacagccatattacgtctcctggactccaagcatatcccagatgctattttcggcatcaacgacgatatggcaatcggcgctatggaagccatcaaggagaaaggtctgcaaattccggaagatgtagctatttttggtttctcaaacagcaaacgttcacgctatatgacgccatcaatcagtaccatcgaccaattcccggacaagattggagagacagcagccgaattgctttttgagcagattttagatcccaaacatgcaaaaatccgcgaagaggtcatcaactgcgaattgattgtccgtgaatcttccgaccgctcatatttggagaaataaagacaaaccgacacttaaattcaatatgaaaacgcccgtataaacgggcgtttttcttataaaaccaataattacaccctataaaactaacgagctttaacctttagataaaggtttttcacacttcaaggaagcatatagatttatcgcggttaaagatagttaaataggaaaagaataagtccatcgtgattatatttgttttcggtaatactaagggaattattgagtaacaacgaaaatagaatatatggatgtagttgtggaaaacttaaccaagtcgttcggcttacaaaaagccattgactccgttagttttaaggcgcgtaaaggagaaattctcggttttctcggtccaaacggtgccggtaagacgacgaccatgaaaatcatgtcctgttttctatttcccgattacggcaatatctatttcgataaatactcgatccacaaaaacgctcgcagaatcaaagaattcataggctatcttccagagcacaatcctctttacgaagagatgaatgtgattgattttctagaattcattgccaaaatacatagaatacccggttataaaataaagcctcgtattgtcgatatgctccagttgtgcggactggattcggaaaagcacaaaacaatccgcgaactgtcaaaaggatacagacagcgagtcggactggcgcaggcattgattcatgatccggaagtgctgctactggatgaaccaacaacaggtctggaccctaatcaaatcagggaaattcgcgaactcatcaccaatattggacgagaaaaaaccattattctcagctcgcatatcctcgcagagatagaggcaacatgcgacagagtgctaatcatcaacaaggggaaggtggtcgcaaacggcacatctgaagagctgagaaaaaaatcagactcagacaaagttttgaaagtgaatatatgcggagctccggagctggagatatacaaagaactggtaacccttcctgccgccaaggtatcacaccaccgagacgaacactatttcaatgtgcgctgcgaccgacaaataaatatagaaaaagacattttcgacttgtgtacacacaatgactggtacatcaacgaactgacacccattgaaacgcgactggaagatattttccgacaagtaacccaaaattagaaagctatgaagacaataaatattctcataaacaaagaactgagcaacagcttcaattcctggggaatttatatcggctacctgattttcttctgcgtgtgcggcttttatatctggctatcgaataacaatatattttatttaggtcaagccaccatgatgcctgtctttgttatcatcaactggacacaattctttatgattccggcattaaccatgcgcagccttgctgacgagaaacggagcggaactttagaattgctgctgaccaaaccaataaaaacatccgaactcatagggggcaagttcttttcgaatctggccattgcagccctggctcttgtactgacactcccctattacctaaccatctcatttttgggtactatcgaccatgggaccgtattactgggatatttcggtttgctgtgcatggcagcctgttatatcagtatcggaatttttgcctcatccctgtcaaggactccggtaaccgcattctttatacattatggtatcggactgtgcttccagaccttgttcggcatgcttgcaactcaatttcataatggcatcattgccaatatactcaactatctgtccatggaagaacattttgacacattagcccgtggaattctagacacccgtgatattatctacttctgttctatctgcgccatatttctcgcactttctaaatttttcgtatgtaaaagtaggttctagcagaatttaaaattttaagtcaggaaggttatgaagaagattttaaaagatattagttatatactcatctgtgtggtgctgctgaacattatttcgtattttatatacatacgttgggatttcacagcaaccaaacgctattccctcagcaaggtcagcaaaaacatcatccagcaaaataccagaaatattgctattgatttttatgtcacagaagacctgccacaagatatacaaaaactggcaaaagaattcctatcgctgctcaaagaatacaaatcattgagcaacacagattttacaataaatatcatcaatcccaattcacaagcaacagagtttgctgcagccaaggctggcatcgaacccatttataaagagattcgagaacgggatttggaaaaggtgcaaagaatctttattggtgccgtgtttcatatcggcaacaaagaagcagtcattccgaaaatcaacttcgacacccccattgaatatgaaatcacccgcttgcttaaacaagccaacgattccataaaaccggtagtgggatttgtcaaaggacatggcgagatgccttttaataccatgccccaacttataaacgaattgtcgcatctatcagaaatccaatcagtagatttgagcacatcccgctctttgaaacaaaacaatgtcatctgcatcatcgaccccaaagatacatattcagcgtttgaactggaacaactgaacaaatacctggacgaaggcggacgcctcttcatcgctctgaaccatgctatcggacaattaggcaaccggaacagcggatttatcaaccgcaccggtattgaagatatgctggagaaaaaaggattgaaaataaagtatgattttatcgtagacaataattgcggaaccatagctatccaccaacaatacggattgctaaactttcaaagcaatatcagtttcccctatattcccatcatcacgaatttcggccaccacaccattacccatggtctgaaatcgctattattgccttttgcaagcagcattgagcagaaaagaggagacagcgattattattttaaatcactagcccgaacatcaagcatttcgggcattcaacaagcaccaatcttctttgattttcaaaagcaatggactcaaagcgactttaaccatcccaataatatcgttgcagccctgctaagcaatgacaagaacaatagtgctatcatcacaattacagatgctgactttatcagtaacgaaatcgtcacatccagtcctaccgataacatcaattttgcgatcaactccattgaatggttggctgataattccggcctcatccaactgaggaacaaatttacaacattctctctattagagccgattgaagactacaacagagagctattaaaatatttgaattttttcatgcccattctgttgattaccatcggagcttttatccaccacagacataaaagacgcaaacgtcttgaacggtcgcaatcaatagattagattagttacgagaaatatatttgcaaatacgggcataaagttcagtacttaccggagtcaaaggcaagcgtaatacattatggcgaatgattccggcagcatgcaatgcagcctttacacctgcgggatttccctcctcaaaaagggcacggcataataaagaaagcgacaaatgtattttttgagcctccggataattgccattacgaacgctattgaccatattgctacaagctcccggcataatgtttgccataacagaaatcacaccttcaaaaccaagagacatcagtggcaaggtcaaagcatcatcaccagacaaaagtgtaaaatcattgcgtttttctcttaatatttccgtagcctggtccatacacccggaagcttctttcaatgcgataatattaggacactcagcagccaaccgagtaatcgtcgaagcagacatattaacacctgttcgtccaggcacattataaagacacaacggaagcggcgatgcttctgccacttgcctgaaatgctcaaaaagtcccagctgattcggcttgttataaaaaggtgtaatactcaacacgccctgaaaatgtttcaaccagccatattctttcaattcacgcaccacttcacgtgtattgtttccacccacaccggccattagcggcaagcgtccccgattttcatgaacaacgatttctgctacttcagctttttcggcagaagaaagagtagctgtttctgctgttgtacccaacactaccagaaaatcgacacctccttctatgacatgcttcaccaaacgcaccaaggaatctttatccacttcctgattctcatcaaatggcgtgaccaatgctacgcctgtccctttaaatctcatcatgtcattatcattttttaggtgtgtcaatagtgcaatatgcatacaaaaaccttctttcctactgacagacaataccatttcccatccgtaggatatcaacatattgtattgacaaaaataataataaaaacatgaaaccctccaatttgttgtatcttctacaaaaaatccacttttttgaaaaaaaattgctgaaatgcttgcattgaccagttattatacatatctttgcaccgctttagagataagacacggactcgtagcttaatggatagagcacttggttacggcccaagaggttgtgggttcgactcccgccgagttcactcttaaagacaagaccttcaaatcaaatgattttgaaggtcttttttattgtatactccagctattctcatacaagctcttgaataaatttacattttccaataaaaatatggattgttacatatcaaaatacttgcacaaaccaattattgtacatatctttgcaccactttagagataagacacggactcgtagcttaatggatagagcacttggttacggcccaagaggttgtgggttcgactcccgccgagttcactcttaaagacaagaccttcaaatcaaatgattttgaaggtcttttatttttattgcgacttacattaagtttattcccattttttcaacaagaaccgtggattgatacggaaaaatatcccaaaagagaaactagttgcattacccggagaagaaacaacaccgtttgcatctatcattttacccggcatagactgataaacatccacctgtgcacctaatgcgtaacgtttcccaaatgtcctggaatactctgctgaagcaaacaatgtctgcggcttatcaaacaaagctcctttattacgcgtagaagcagctccgaaatatggaataccaaacagggaaataaagtccttggcatagaaatatccagccttaacacgaaaatcttttaaatcggcataggctgcagcataaaatcctataccattatcatacccccatagtttacctgcctgctgataataaccaacaaaatcagcctcaacattaaaacgcttcaatacccgacaatccgtattccaggtaatcccggcaccaatagctccattcatcagagtctggacagaattagtaaacagggtgtcctgttctccgccgcggtgttggatggtagcttgaattgggctatatacatgcacccgggcatcagtaggtgtaaaatcaatttgcgaagagagaccaacagtaaaagcttcctgatgggtgtcgttttcaaaaatataactttgccaatttacccatacatccaaatggtaggcacgagtatcaaacaacaactgaaatcccatttccggatcggcagtcatattcaattccggatgatacagcggtgcaatcagccgatgcgtggaaccgccataaatattaccaactaccaaatttacttttccaagctcaaactgggcacgaaaaaatggcaataaatgcgagcctttctgatattgattgcctttccatacagcgatatcatcataagccatagagggatatttatatgcaccgctatacaccaatgcatgcaaacccaattccagtttgatatttttcaaaggctgatataccaacttcggctgtagccacagacccggcaaagaatacccctccatcacctcgccagcaaattcattgtctttaaaaaaactgatattatccaactcaacgaacaagcttttagaatcaccggcattcaacctataatcagtcttatagactttatcttccacttgcgcaaacacagctccatgggcaaatagacaaacagctataaaaaacgcccagtaaatgtatttataaaacatattgattatgattaatatataataattttaccgggcgtaaaaatacagaatattcaaataattctggcagatattacaacttttctactttcaaattcgttattttactcttaaaatcaccagcctgctccaacgggaataccaaggttcgcaaataattcatgctggttttgccatcattaaaatataacttggtctttcccagctcgtccaccaatttaccattgacataaagacgtgtagaagcattatccccttcaacggctatatgcaagcgttcgcctttcagaatattctgacagaaagtattcaaataactatcacggacaaatcccaacataccacgaatcggatcggagagataaaacacagcgtcaggagaactaaaaagcaccgtacctttggcttcgtcagccacttctatatcaaaacttacccgatagttatagcctatttcccgataaggcaaccgacttcccggcgtaacaaccgcctgctcataaacgaccccggtatttttaccgatacgccccaactgattaaccccaggagcttcactcaaaccggaacgtttatcttcaaaatcagcaaaaggcaaagtaaccgatttgccagtccacatttttacagccaaagtctgcatagcagggtagacacgatgatatatgtccttgacagaaactccattacccacctgatcgttccatacagcgaacattcctcccaaaatagccggatccttttcatcaaacacagaacgtcccaccatagccggagtccaagaatcatataaatattgagtattcaaatagtcataataataaccggcagccggaacaatatacaaaagtccgtcgggaatactgatcaatttataaccttgttttaccatctcaaaaggatcgacataatctttagaccaagcagaaataataacattttcagatttcacaggagtttctcccttagcatgagtcagagccccccacatacatgcctgcttaccgaagctctcaacataacgaatataccggtcggtaaattcgcggaatttttccaccaccttctgatctttattagaatattcatccgtaccaatatgaactcttggtcctcggaataccggttcctccccttcgagatactctttaaaaagtgcatccataaatttataggtctcggggtggaacaaatccaaatggtccatgccatatttttcactaccaatttctggtttataatgagtgaaggccaatgtatgggcgggagcatctatttccggaataatttcaacaaaacaagcttctgcctgcttttgcaagtcaataaattcctgtttcgtataatatccatcccttgcagccaaaccggggaaagtttccgattccaaacggaaagcagcgtaagtctgattccaatcatggttaaaaaactgtttgaaaccattatcattcaaatgaatctgcagcgtattcattttataataagccataacccgaacataatcctgcaaagcattcaaaggaataaatttacgcccacaatcaatcataaatccccgcatttcataatcaggataatcacggactgttccctgaggcaagtgatggtcatcctgttgctctgccatttgcagcagagtacgcgttccccaatatactccaataggttccggggccgccaacgtgacacgatcagcaatacggatagtatatccctctttgcccaacttcttatctttattcagctgtaaagccaaatcccctttctgtgcctttccttctacaacttcaggagcatatccaaacatgaggcgacaatcttctgccagcatctcaccaatacgcaacaattccttctggcctttggagcaaacaatccgactttgcctagtcggaacaaatacaccttctccgcccttccattccttcaactccggaattacaaacggtttttcatcatttgcagcaaacaccgctgccaagcctagtagcccccacgcaaccagcaacaaacaaattcgattaattaacttcatatacattcctattttaaagatttctatattagatattcaaagatagtaaattttttaaaatagaaaaacattatccatagaatcataaaaaaagacagactcccttatcagaagtctgtctataaagagcgacaaacggggctcgaacccgcgaccttcggcttgggaagccaacgctctaccaactgagctattgtcgcaattgaaagatagtgcaaatataaacaacatatttaaatgcacaaactcctagcataaaaaataatccctatctttggaaatcaaattccaacaaatatgcagacagaggagctttatagtttaagagaagatttccatcaacatccggaactatccggcctggaaatacgcacagcttcaaaaatagttgaagtactcaaagaattaggcaccacccaaatacacacccatatcagcggacatggagtaattgcagagtatgttttttcatcagaaggtcccaccattttattccgtgcagacattgatgccgttgccgtaaacgaaacacaatcctgcttttataactccgacaatccgggcgtatcacacaaatgcggacatgacgggcacacaaccatacttctagcaatggccaatctattacaccaatttccattaaaaaaaggcaaagttctgctactatttcaaccggcagaggaaaccggtcaaggagcaagacaagtgctagaacatcctttttttcaaaatatgcatatagataaagcttacgcattacataacctgccaggttttccgttaaaagctgtcgtatgccgggaaggcagtttcacctgctcagtcattagctgctccatacaagttgaaggcaagacatcacatgcagcagaaccggaaaaagctatatcaccgacagctgttttactaaacattttagaaaaaaccatgagctggaaccaaggagaaccggaaatgcaagactattttcgcaccactcttatagaacttcatataggagaggaagcttatggtattgcagcaggaagcggagtgattcgtttgacaatgcgagcctctacagcacagcatttaaaaatacacacagataaacttgaaaagttagtcaagcaattaaaggaaaattatcctgcactacgcttttcaacggaatggctagaatcctttactgccaatgaaaaccaagcagcagccgtgagtgtcatcaaacaggcagcaataaaaaacggactaacatatgtagagacaaattgccctttcacctggggagaagatttcggtctattcacacaacatattcctggagccatgttcggtcttggagcaggagagcaacaaccagcacttcatactcctacatatgattttcccaacacaatcattgaagccggagcgcaaatgttttaccagatagctgtggaagaaacagaaaaagaatgattattttttacgacgaagctcaaagtttttacccaaataaacccgacgaacttccgggtctgcagccaaatgctcggcagtaccggcttgtaaaatacgtccgtcataaagcaagtatgcacgatcagtaatcgaaagagtttcctgtacattatgatcggtaatcaaaattccgatatttttatctttcaattttttcacgatagactggatatcttctaccgcaatagggtctactccagcaaacggttcgtccaacaagataaatttaggacggattgaaagcgcacgtgcgatttcagtacgacggcgttcaccaccggacaactgaatacccaagcttttacggatgtgttgcagaccaaattcgtctaacatctcttccaaacgggctttctgttcttccttactcatcgttgtcatttccaataccgctctgatattgtcttcaacacttaagcgccgaaacacagaagcctcctgtgccaaataccctacacccaattgggcacgccgatacacaggctcctttgtaatttcgcgatcatccaaaaaaatacgtccaccattgggggttatcaaaccaacaatcatgtaaaaagaggtcgtcttaccagcaccattgggtcccaacaagcccacaatctcaccttgttcaacatcaacagacacgtctttaactacggtacgacttttatatttttttatcagatgttctgctcttaatttcatggtccatgttttttacgcaacaaagataaactagaaattcaaattcaccgaaatattcactgcaaaattctgaatatcctgtccgggcatccctttgcgatgggtcaaacgccaaattgcatccaccctgaaaagccggaagatattctcaataccgattccagtttcaaaatatggtttcgatacagctcctaaaccggcagggaaacgcaatatagcatcagtgttttcaagattaccattattcttatcagccaaagtacctatcaaccctttaaacacaaagacctcacgccacttcaactttttcatcaaaggtattttgcccaagaaaaaacctttgaaatgatgttcatagaaaaaagagaaccatgcatccgatgcgaactcataataattcatacaagagaatgcgtaggaatcataaaaataggttgcattcccttcatgcaacttcaaaagtggataaggaaccttaccaaatattttacctccggtcaaaaagaattcagaagtcccaatcggtgaaatttgcagactataattgatagaagcaaccaaccgataaaactcataatcgtttttaaagacacctttgatgccggcagccaaatcaatgctcaatataggataatcagagcccaaagaatacttatcaaacggcttgcgaacaataatctcattctttgacaagcgagtattcaaatgcacaatcgtcgatgaaattgtagacaaaggagttccatccggacgcacaaacggaacatctccattggcaaatatttccctaaattgcacgccgaccgtattactgattccctgtcgccactcctgttcaaaatctaggtctagttgattaaccatcgtcaagcggtcgtcactgccccgagagaaaacagaactcaaaatattactctccgtaagagcattcacaccagctcccaattgcaccatatcatgtttaaaagcaacattcaacttagaagttggcaattcccgaaaagcatattcaatacctcctccgcccttccacttatggtccttcaagccatatgctccatatccagaaagacgtattgtgcgactaaaatctgttgtagtacgcgctcccaactggaaacggcatccctcttggtcattaaaactcaccagtttataatatggtccaaattcaagatattttgtatcataatagccccctaatgccattgagacaatatcataaaaagtctgatacaacggtacatttttcacagaatcgaccatcccatatatcgacttctctttggcactcaaactatacgggcgaacagaatcccaataatgttcatcgtttttcaacactccgctattaatcatgacattattgtccattcgtgcaacctctttggggatgcccggattcaaacggacatttgaataatcgacctgccgatgtcccagaaaagagaccattttagcggaatcagacataaaaatagaaaagtcggcaaatatcttatcctgcttcggaaaccagaccgaatcatccaccaaataattctcattatccaaaacaagatgtctaatccaattgacattaagccccttcaccatttttacatgtgcagactgcaaagcccaagtggcagagtcaatattgacttctccatccaatacgggagtagaaaaagctttcggatgaaaccgaatcttatacgtctttcgtccatcaacattcatactatcaatcagaaagtacttataaaacatccttccatgatcggccaacggacttgcgaaacgcacttcaaagacatctataaaattatcatacagattaatgtttacatgcagatgcccggtaaattgtgccaatgtataatcctcctcaatacccgatatccgactggctttgacgatttcacgagataaaggcggagattttctaaaataataatcagcagaggattcagaaatcatcaccggcaaatatgcttttccagtgacgacagaggtatccatatggttaaaaataaaaccgaaattcttttgcaatttcttattcttaaagcccggtttaatattcgtcaaatcaagttccatctttgtataggtctgacaataatattccgacaaagctgaacgactatttttcgatttatttttaatcacattacgtaaaatagcatgtgcaggattttctccaggagtcacctgtacttcatccaagtcgaaagcctgtggttccaaagcaaaatccaccatattgaatgctccgggaataattttaaccttttgagaaacatagccaatcaaggaagcttctacctcagaaacactttcacgcgtttccagtgaatacataccatcaaaatcagtagcaataccaacggtcgtacctttaaagacaacactcactaaaggcaacacctctcccgtttttgcatcggtcaccttaccccgcacacgagtgctttgagcaaatgcgacattaaaaacaaacaacaataatattataccccaacccttcatcattattttttataaattaaatttgctgattacatatcaaatcagacaactccttcccgaagaatgtcatggatatgtaccatacctttatagacattcccttcacttactacgattaattgggtaatactgttctgttccatcttctgaaaagcattatatgccaattcctcttcagaaatggttttcggagagacagacatgatatccttagctctcaagggatcgacatcctggtatttttccagcattcgtctcaaatcgccatccgtaataattcccaaaagatgcccttcatcatcagtcactgcaacagcacccaagcgtcctccggacatttccaaaatcaccttacgtataccatcctccaacgacacatgcggacgattttcagaatcgtatacatcagacacccgggtatacaaacgcttacccaacgaaccgccaggatgatatttcgcaaaatcacgactagaaaagcttctgcattgaatcaaacaaattgccaatgcatcccccatcaccaattgggctgtagtagatgtagttggagccagattattcggacaagcctcccgttcaacttgcgctttcagtacataagcagcattatgtgccaaaaaagaatccgtattagataccatcgcaacaattttatcattgccgacattacggattaacggaatcaaaactttaatttcaggagtattaccacttttagaaatacaaataacaacatcatcgtgacacaccattcccaagtcaccgtgaatggcatcggcagcatgcataaaaacagcaggggtacctgtagaattaaatgttgccacaattttttgagcaataatagcactttttcctatgccagtaacaatcactctgcccttacttttatatatcaaattgactactttttcgaaatcatcatcaataaagttcgagagattctgtatagctaaagcctcatcagagaccactttctttgcaacagacttaatatcaaccatataaaaatattttaatacgttttcagacgtcttttaaccactaggcaatatttatgccaaaaaaaaacaaataaagtattgccacaataattttttactgtaactttactaatgacaaaagtatcatattttatcgttcgtccgacaggacaatgaagagatttattgtgccatatttttgttgattcgaattaagttataaatttgcacacttcaaaaaaaagtgtgcagaataatattattaatacaatgggattgcagattgatttacatgcaaaattgaaagaatattttggtttcgacaatttcaaaggaaatcaggaagccataataaaaaacgtgctggcaggaaataacacatttgtattaatgcctaccggtggaggaaagtcattatgttaccaattaccggccttgctgctggaggggactgctattatcatatctcctcttatagcattaatgaaaaaccaagtggatgcgatgcgttccttctcagaagcagaaggtgttgctcattttctaaactcttctctgacaaaaaatgaaatactaagtgtcaaggaagacatcctcagtggaaaaacaaaaatgctttatgttgctccagaatctttaaccaaagaaagcaatgttgagtttttgaagaaaatcaagatatcattctttgctgttgatgaagcccactgtatttcagaatggggacacgatttccgtacagaatatcgcaaaattcgcccaatcgttgaagagataggtaaggcgcccatcattgccttaacggcaacagccactcccaaggtgcaaaatgatattcaaaagaatttggatatgatggatgcacaagtattcaaatcctcgttcaaccgcaccaacctttattacgaagtgcgtcccaaacaaggagatgttaccaaggatatcattaaattcatcaaaaatcacgaaggaaaatcaggaatcatatactgtttgagccgtaaaaaagttgaagagctggctgaagttctttgtataaacggtatcaaagcggccccataccatgccggtatggatgctacaaccagaagcagcaaccaagacaaattcctaatggaagaagttgatgtcatcgttgcaaccattgcattcggaatgggtattgacaaaccggatgtccgctttgtcatacactatgatattcctaaaagtcttgaaggatattatcaggaaaccggacgcgccggacgagacggtggcgagggtatctgcctgacttattatagctataaggatatccagaaattggaaaaattcatgcaaggaaaaccaattgcagaacaggaaatcggcaaacaactgttgatggaaacagtagcctatgcagaaacttcactctgccgccgcaaagtgttactccattatttcggcgaaaactatgagcaagagaactgtggctgttgcgataattgcctatatcctaaaaaggaatttgaaggacaagaatatattgtagatgctttacaacttgtggctgatgtcaaagagaagtttaaaatagaacatcttgtcaatatattagtaggagaaacagacactgctatcaaatcgtacaaacacgatgaattagagctttttggagaaggtgcagacaagaacaagcaattctggacaatggtttaccgaagagcattggttgcaggttttattgaaaaggatatagaacaatatggtgtcatcaaactgacagatgaaggacaaaaatatctcaacaaaccttatagtttcatgctaatggaagaccataattttgaagataatgatgacgaagaaaagcttcaagagaaaggtggagtatccgctctggacagtacgttatttgcaatcttaaaggatttgcgcaaaaagatagccaaaacaaacaatttgcctccatacgtcattttccaagatccttcattggaagatatgtgtacaaactaccctatcacgattgaggagctggcaaatattcaaggtgttggagccggaaaagcacaaaaatacggtaaagagtttatcgaagtcatcaaacaatacgttgaagataatgagatcgaacgagctcaagatatggtggtaaaaactgttgccaacaaatctaaattcaaggtatatatcatccaaaacattgaccgtaaaatagacctggaagatattgcttcagcactaagtctctcctttgatgaattaatcaaagaaatggaagctattgtattttctgggacgaaactgaatatagactattatttgaatcaaatcttagacgaagaacaacaagaagaaataatggactatttcatggaagcttcatcagacaatatttctgaagcgtttgacgaatttgaaggagactatgccgaagaagatttacgcctgatgcgtctaaaactacactcaaaacacggaaattaattaagaatgcaacgttatacgttgcattctatttttcatcacatcacaattacacaaaaaaaacgtctcagaaaaatttctgagacgtttcatttatttataaacttcagatcgattagatcttatggataaccataccggaacgcaatttcggttcgaaccaagttgttttcggcggcatgatattgccagtatctgcaatattaatcaactgctccatagataccggataaagggcaaaagcaactttcatttcgccactatcaacgcgttttttcaattcacctaatccacgaatacctccaacgaaatcgatacgtttagaagtacgcaaatcctgaatatccaaaatatcagccaatacatggttagacaaaatagtcacatccaatactccgataggatcagcatcattatatgagccttctttagcagtcaaacgataccatttgccagccaaatacatactaaactcatgcaattttgcaggatgataaatttcagtacccatatcttccacaacgaagtgagcattcaatttctccaacaactgagcttctgtaagaccattcaaatcttttacaacacgattgtaatcaatgattttcaactgatgatccgggaagtgtacagccataaagaagttgtattcctcagttccgttatgattaggattcttatcacgatactctgcgccgatacgagcagcagcagccgtacgatggtgaccatctgcaacataagtataaggaacttttgttgcaaacaattcctccaagcgcttgtttgtttcaggacaattgatagcccagaaatgatgtccaaagccatcttctgcgacaaaatcataatcagctttctgatttttcacgatatcttcaacaatagcgtcgatttcaggcacagcacgataagcaaagaataccggctccaaattggcattcacataacgagtcagcaccatacggtcctcttccttatcaggacgggtcaattcatgctttttaatgataccgttcatgtaatcttcgcaagctgcacaaccaacaataccatattgagtgcgaccttccatagtctgcgcataaatatagaatttcggttcagcatcctgcaccaaccaacctttttcctggaacattttaaagttttcaacactcttgttgtaaacaacctcagaatgaatatcagttccagccggacagtcaatttcagcacgagtaacatgcagtaatgatttcggttttccagcagccatttgggcagcttcttccgaattcatcacgtcatatggcaagcaagccaattcttcacatacttcctgattcggagtacgcaatcctctgaatggttttacaattgccatattatttatttactttaaatttacaatctccattttcaaagaaagcaacaatctgacgagctgcagccaatccagcattaacattagcttcttcagtctgagcacccatcttcttcggagtgaagaaatagcgaccttcgaactgagcaaattcagcagcattgtccggagcgatatcagcgatatatttgaaatcaggacgttcagccatcaatttaaccaactcagcctcgttgataacctctttacgagcagtatttaccaacacgccacctttcggcatacggctcaacaattcatagttgatagaatttttggtcttatcagttgccggaatatgcaaagagatgtaatcacaagcgctatacatttcttcagcagagtgcattggaattgcaccggcagccttaatttgctcgtcagtcatgaacgggtcgaaagcataaacttccataccgaatcctttagcgatacggccaacattctgacctacgtttccataagcatgaacacctattttacgtcctttcaattcgtgacctgattttccattatagaaattacgagccatataaatcatcataccgaaagccaattcagcaacagcatttgagttctgtcccggagtgttcatagcaacaactccacgatcagtacaagcctgaaggtctatattatcataaccggcacctgcacgaacaattactttcaagttcttagcagcatcaataacttctttagttgctttatcagagcggataatcattgcatcaacatcagcaactgcttcaatcaatgcttcttgagtaccatatttttctaaaacaaccagctcatatccctgagcctccacaatttcgcggatgccgttcactgcaactgcagcgaacggtttatctgtagcaattaatactttcctagccatgatttgattattttttatgtttagcttcaaattcctgcatagcagcgattaaagcttttacatcttccattgtacaagcattataagtagaagcgcggaaaccacctaccaaacggtgacctttcacacctacaatattcttagatttgcagaaatccaagaattctttttccaattcttcatatccttcagccaacaagaacgggatattcatgcgagaacgtgaaccttcttcaacaactgcacggaatacagtattacgttcgaattcagcatacagagcatcacatctttcgatagccaatttttccatagcttcaacaccacccattgatttgatccatttcaaagtctgaccaacagcaaagatgttgatacatggaggagtattgaacatagaaccgttttctacgtgagttgaatatttcaacattgtagggattttacgatcagctaccactttttccaagaaatcattgcggatgattacgaatgtagcaccagcaggtccgaggttcttctggcaaccaccataaatcatagcatattttttcacatcgataggacggctacagatatctgatgacatatcagcgatcataggcactgggctatccaagtcctcaaaaatttcagttccacggatagtattgttagaagtgatatgcaaataatcaacatctgtaggaatagaaaatccttttggataatatgtaaagttgcgatcttcagaagaagcaataacctctacttcaccaaacaatttagcttcagcgatagcttttttagaccatacacctgtgttaacataagcagcttttttgcctaagaagttaaacggaatcatacagaactgcatgctggcaccacctcccaagaaaataactgaatagttatccggaatattcaaaacttctttgaataatgccactgtctcatcatatacagcctgaaaatcagctgaacggtgagatacttccagaattgactggccacagctacccaattccatcacagcttttgcagtattttccagagtcatatccggcaatttgcaaggtcctgcattaaaaatatgctttctcatatctataataattaaaggttataatttatttggtctctttttttctaacgttacaaagatgcacattaaacttgaattaataccatttcaaaaggaaaatcttctcttcccgttacaatttaaaacaatattaacgtttgcatttataaaatcataaccatagaataggtatcctctattctatggtatctgttctattaaaagaacggagtttttacaatcttagctttcaaagctttatttcttacccgaataaagatctcagtatccaatttatggaatccactcttcacataaccagtaccgatagattttccggtaagaggagaaaccgtaccggagcaaacaactccaatttcattaccttcagcatcttcaatcggatatccctggcgagcaattccacgatcaaggatttcaaaaggcttcatataacgagtcggtttatctgccttcaatttttcatgatactctctcatgataaaatcattacccggaacaaattttgtaatccaacccaatccggcttcaattggagaatggtcgtcatcaatttcatgtccgtataggcagaatcccgcctccaaacggagagtatcacgagctcccaagccaataggcaacacaccgaactctttaccagcttcaaatactgcattccacaatttttctgcatcggcattatatgcatatatttcacaaccacccgaaccggtatatccggttgttgaaaaaatcactttatcaattcctgcgaacggaatttctttgaaggtataatattccatatccaccacattggcatccgtcaatttctgcatagcctttaatgccaaaggtccctgaacagccaactgacaaatagcatcagaggtattctccatatcaacacccggcttcattcctaattcctctccgtgcttaacgacccaagcccaatctttgtcaatattggcagcatttaccaccaacaaatatttttcttcgctgaatcgataaaccaacaaatcgtcaacaataccgcctttatcatttgtaaaacagctatattgtactttaccgtctgtcaatgcggcaacatcattcgttgttaatttctgcactaattcaaatgctttcggacctttaatccaaaattctcccatatgagatacgtcaaatacacccatttttgaacgaacattattatgttcttctttaatacctgtactatattctatcggcatattataacctgcaaaaggagccatacgagcccccagagcttcatgtaaatgggtaaaaggagttgttttcatattttatatagttaaattattttggtttattcatttacatcaaacattttcaccgaacaaattgcaaacgttcgcagagaaatgcctcacaaagatataatttatatccatttcttcatttcttttccaagtttaaatttccggccaaaacaattttatttgaaaatttatttggtttatcaggcaaattgttatactttcgatattcaaacatacaaaacactgagattattaaaataaccaattcgcataatctccaaaaaaacaactcaaaaacgtgtataatgattacaaaaattacagagcgtcaaggctctttaatagcagaatttatcgacttaaaacggtttaccctagccaatgtagaaaaagtaaagacagaactaacgcctatcctggcacaggagcacacacaccttatttttgattttcaaaagattgaatttattgacagcagcgcaatcgggtgtatcatttcattagtcaaaacagccaaaaaacatggcggaaccgtcaaattagccaacatcacacccaatgtgatggatgttttagaactattgcgacttcccatgatactagatatcattccaaccatagaagacgggttataataaaaaaagaggcttgaaagcctcttttttattatttcatataccaatctgcttagtcgcccaaagtagccaccattacagccttgattgtatgcatacggttttcagcctcatcgaaaacaattgaattcttagattcaaaaacttcttcagtaacttcaataccatccagaccgaactgtttgtgaacatcacgtccaacctgagtttccaagttgtgatatgccggcaaacaatgcatgaatttgcagtttttgtttcctgtcaattccattgtttttgcatttacctgatacggtttcaacaagttgatacgctctgcccaaacttcagcaggctcgcccattgatacccatacgtcagtatacaagaaatcgcaacctttaacgccagcagcaacatcatcggtaactgtaacagttgcaccggtttctttagcaatagcctgacaagtagccaccaattctgcatccggctgtaatgctttcggagcaacgatacgaacatccatacccatttttgcaccaccaaccatcaaagagttgcccatattaaagcgagcatctccaagataagcgaaagtcactttattcaatggtttgtcaacatgttctgacatagtcaagaagtctgccaaaatctgagtcgggtggaattcatttgtcaagccattccaaacaggaacaccggcatattttgccaattcttcaacagtagcctgatcaaaaccacgatattcaataccatcatacatacgacccaatacacgagcagtatcagccattgactcttttacaccgatctgagatcctgtcggtcccaggtaagttgcatgagcaccctgatcataagcagccacttcaaatgcgcaacgagtacgagttgaagttttctcgaaaatcaaagcaatatttttacctttcaaacgaggttgttcagttcctgcatattttgcttttttcaaatctgctgccagattcaacaaatacttaatttcttccggagtataatccagtaatttcagaaaatttctgtttcttaaattgaaagccataattctttattttaaatagttgctatatctattttttctttcgttctgcaaagataatgttttatttcaacacattattcgtaatgcatggtgatttttgaaccataacgacggtcttccaatttggtcgactctgtaattacagctttatcaccacctttctcaacgaatgcaagacaagcacggattttaggagccatgctaccttctgcaaatattccttcttccaaatacttcttggtatctgcatagtcaaggacttcgagaacttcttcattcggctgtttataattcttatatatataaggtacatctgtcaagatatacagctcatccgcttttaccaaaccgccaatcattgctgaagccaaatctttgtcaatcacaccttccagcggctgcaacattcctttttcatcctcaaagacaggaataccaccaccaccaactgtgattacgatatttccttcacgagccatacgctccaccaactctgcatttttcacattgataggagcaggagaaggtacaacacgacgccagccaccattagctttaatctcttctttaaaaatccagccatgctcagcagccagtttatcagcttcttcacggctatagatacgtccaacgcgcttggtaggattttttaaagccggatcatgctcatctacaacaaccggagtcacaatagacattacattcctttccaatccatgctctttcattacatttcgcaaattgcgctcaatcatataagcaatctgcccctgagaataagccacacacatatccaatgtcatcggaggcagatcatacattttcacacccgcatcgtcactcattaaaatattaccaacctgcggaccgtttccatgtgttataatcaagttatatccttcttttatcagatatactaaattttccattgtatcacgaacattcttattctgttcttccacagttcctttctgatttccacgcagaatggcattcccgcccaaagctacgacggctaacttcttcttttccattatatttcttttaaatgattctttttcaaaacaccctcttctattcttttataagggagagcactacaaatttaaaaaataaagatattcaaaaaacaagcaaaacaagattttataattttacaacacattgaaaatcaatatcaagtataattattcaatctgtttttataattatgcagcgcaaaatctaacattcataatccagattgccacacatctatcctcacgcatctgaatacggactaaaacatatcgtcaggcctgatttgaatagcttttcttacaagaccgactcgagtttgagaacactcccagcaatccttatcttggaaagcctttttaatctcttctgtaaaactgcgttttttttaaaccattggtcatttaaaatcatctacccttatgtaatttaatgacatttcaggattatccacatagtaactccatgataaaatatagtttctatttatgtattcaaacgtccatcctgtatatctttctccttccaaaggatattccctccaataatttaaattatttatattatcatatataagtattgaatcaatacttattcccattgacgttttcttccaagttgatattgaggaataaactaatatattatttttattatatactatttgttcaaattttccatccgggtagagttttaatgtatctttactatttatgttgtttacatatactccagaaggtgatatttgtgctaaatttatgatgcgtatgataatatatgcacccaataaagcaatcagtaatgcaaaaaaatttttttttaatttcttcatattcatgtttacaatatctcgcaaaaatggactttttaagggacgattatgtaattccttctctttattctatcacctaaagaatatctgaatcattcttatttgaagtccaaatatatttaataagaaaaatcaatgcaattacagcagatatattaggaataatatgttcaagaaaaaacgttttaagactcgtatatacagacaatgagagcaagtcaaaagtcgatataaacaatatcataaatgcagaataaattaaaactgatgtaataataacctttaaagttataactgatatttttcgcaacatacctttatgactgtattagttaatccttgctagagtgaatataattcttaatttcattccaaaatttaaaatccgagtctatcggggaacggtgtatataattaaattcaacatcccctgatttttctctaatttttagatttgcatttttcaatgaacccagccctaaattcatatcaaacaaaaagaacaggatcattcgtgttctggtaatcaacataatacgtttcgtttgattttgggttgttaattctatcaacttgataagtattaatcatgacattatattcgacttttcttcccctttccttaagatatttttcaatacccttagaatatccattccaataaggtgctccggctttaggagaaccgcctccaatcttcccattgatgaaaactatcttatatccatcaggatctatagcattaactggatttgagccaacgtatagatacgatgtatgttgtggatatttttcttgtagagcatccgtagaaatccacaaacttaccctcggttcatagtacctcgccccatagtaatacaatcctgtctcctcatcgaattccttcgcgttgaagagataaggcgtattccagatactgttccgctcttcaatgaacacttcgccgaacggcacatactcgatgtgctgaaccacctcgccgtccaggttggtgatgtagctgctgctgcccaagtggtcgggatggtagtagaactgcaacttctcgtatgcgtccggatcctggaagttgttttccagtgccaaggcacgggcctgcgccgcttcgggagaagcgtcgttgcagcagaattatcgtgccagcgagcgaaatgcaaacttgtttgcagatttccgagtgcagccgataatgctaacagcaatccctgtccgtccacatagtcgttgttgtccgttccgttgcacggcacctcaaagatagcataattatccttaattacctgctgttgggcggaatatttttgtttgtaattaacagaaaatccatccgtctcgggtcggaaccgtaggaggcgaagtcgccaatcttggaaacgatacgctacgagccgatatagatgtgcttggtgtagagcgcaggaaactaactttcgaaagtatatttaggcattttacatatcttgagattttgcaaattgatttgcagattcgtttggagcatgattctatttgaatcatactcttgtagttgattcaaataggattttttatctccataccaatattgaaatattgcatcatcccattggtcgatactttgagaaatagtcttgtaaacgctctctgccgttttgaaatcattgcaaattagagcgatactataaatcaaacgatatactttcatctttaatacaaaatttccagcgaaagttgaatccttgagaatcctatgtaggaacgctactatgtcattaaatggaatatttctagcgggaatgaatggaacctgtttctgacactgatgaataacgaagtctacatcctcttccgtcatattctcaggaagatagatgtccatatttttattattgagtattggttgttgaaataatggcatatctaagcactctttaagatttgacatccaaagaggacaaatggagaagtatagtttataggcatccctcccaggaacttttaccattacgatgcctataagaatacaatttaacacatagacaaaactacttggagtaatgcctttcaaactaaatttcttgcaaataatctcggcaaattgtttttttgtcatttctttcaaaataaagtggtattgggatagacttattggttaattgtaatcatcatgttgccttcgatgtcttttacattattcgtatatcattatcaagttcttttctccatattagagtaccaatggtcggcaagattatagtgaacaataaagtggcttgggcataacccacaggcaagtagtccccttcaaaaaaaagataatctgtttttgaagaatagtataatttaggaaaatccccagactttatcttgttcaagattcgatctcctgtatgtaatctatattgttttgatttataagttataagaattgtgtttgaactcttatagttacttttttcctcaaatccattatatgtgtaatcagtaataggcttctgtgtcttttctatatagttgccgtataaatggcatagatacaaaacaagagcaagagctaatcctgcgcaaaaaatgctcttaaataatgtcttaatcttcatagcttacctttaaaattattggtggttctaatttgttatgcacaaagttactttttttttgacaaatacgtcaggtcgggattaaatcacctgtgtatcagattgcttttaacacttttatcacctcatgaatacattactttgagcattgtaggtataagcattgttcatggtgagcttgcatccttgcaagacgggtcgtctgctttgcttgtaacacgcccaaagaagactaagagatcgtattatttctctctatagagattaatatgaccattgttttccatagatttctatatcataaaagtattcattccattcttcatagaagtcaactactaacatatttgttaaactcttatcatagaaagtaataagtccactagattcatcttgataatgaaaatatacattaaacatatcaattctgtctaaaagagttaagccgcatatatcagagtttttaattgccatgtaaacaatatcattatattttaattgaatatctgatactatcttttttaatttagttttatcttgaaaaggtatttgcttagcagaccaagctaaattgttttgctcaaatagcatgttgtcgttaatcattttaaagatcatatcagattcttctaaactcattatttttatattttttcctataacaagtttagacaattcttcttgatatatctctaaataccgtttccctgcattttttcttaataaaaactgcaatctatttttcatgataattggcttaagattttttatattcaaaaaattcaaagattagcaatttgtctttttctaatattttcttgttggcatttattcctattcctgtgacagcacgtccacctttctcttttatatagagtataggatataccacctttatgataaatactttaccttgataatctccctgtatcgtatatttttttcctatagcattgtattcaatatgttgccaatggtattcgtttggcaataacctttttatttttctgatggtgcatttttgtttataccaattctcgtataaaaacataccgttagagataccgaatactatacactgaaaaattaaaataaaggaaatatcatcccaagataaattactgccattggtaaaatgaatgattaaacatgatacagataacaataggtagattattcccgtccataaaatactccatagcaagctatctgttaatgcatatttgaaggacgggtaataaacttttttctctccattccagaatcgtttatcggttaatttcattatttgttgatttataaatagaaatacttaatattgaaactacggaagcgataattgcacccaatgctgtaatcagactagacactccgattgtttcaaagtcgctacttatataggcataatacataaaaccactgattctatttgtccatattgttgaagctataagattgcactgtatgactaccatgcttttataattgggggcaattcttactgccatataactataaagcaactgtagaaacaccaactccaaaccataggcgattccatgtttatacagaataattccagcaaagatttgagaataagccgagagcgataagaggattgttgtagctattgatcttgcatttcctttattgaatccaattaggcatattgtgctgacaatagcgattaatatattgcatactatagcactgaaaatcatcttatcggcatcccaataagaatacggaataatgcaaaacattacgattgtaaacccaataattataccgaaagaaatcttcatcgcttctttcctttccggttgataaaccaaagaagtcctccccaaaacaaaacgtttgcaccaactaacagaatatttgtcagtgcattcggtgaatcaaagcaaaacatcagactgaacatgaagagaaacatgacagccgctgaaactataaattttacaatctgttccatcatttgccgcattatttttatcttcctaaaaaggttggtccttttaattgtttatttacaaagttactttttttgatgcaatcatcagttacaaaagaaatcttttaaaatagctattgtaacttattccatatgggcttattttgtgaaggatctgaaacattataaattacaacaatagaatctcccactgaaatactatccgtcttagaataatacagatcatctccgttaaagagctttccgtttacagaaaaaatatactaaaagtgttctgtatatctgatagtgtaaatcttatttacaacagcggtagtggttttactgttcttgtacaatgcatcatcattgcatttttttataaaggatacaatgataatacataatagcaccccagcgattgatacatacacgtctatgttattcttttttatacccatctttatccgttgctaaattatgatttatattaattattttcaaattgcagaatcccattttaatcttggaaagatttaatttctttgcattgaataagaaataaaaaacacatgaatgtcaaaatgtgcttcctaaaaggattaaactttttctattagcaactccaatgaatcttcttcaagagagttaaattcatcaagatgaatgtgcatccctgttggaacggcatcttgagctaaattcagtaaatgatttgctaaagaaactaacccttctttattagcttcaattgagataatcccactttcactggaaattttaatttgataaccatcttcccattttagtgtcatccccatgtcaggagaatagtttgggatattaagtgatgctttcattattactaagtagttataaaatgtgacaaatatattctgtacaatcatcatctattttagaatatgtcggtaaaagaccgcattgtcatctaccctgccaccggagttgatattatgttctgatggaacataaagcgtatctacaatggtgactacaggcttaggtatattgtatatccctttaaatttccatattttcccatcgctgttacgcttcaggaaatgagcaaaagtccatggtccaacatcaaaatgcaacatcgtataatccgaatcaaaacaaatcacgggcttatatcttacgattacagtatcctctatcgaaacacatccatcatgttttccccgccatacaaggctatcttgtacctctttgcgaagctctatgtacttcacaaggataccatcagtataatcaatgattcggctatcaataaacaaatagcttatcacagacaagactatcaagccggttattattatccactttttcattattttgtgtaataaatgatagttttaagttgctactgtctataaaataagtcaaccatcgcctttataggatatttagtttatctttaaatgtcagcaggatgccatactatagtcgtctaaaaattcacttaaatcttctgcaaatgtattcaatcctacgattttgccaagagactcttgtactgtcggaaaaacattaagaaaaagtcctgccttacaaatataatcaattacagattcttcaaaagaatcaagagttatagcaacactttcgcaatccgtattgtcattgatacaaaatgcttgagcatattctttggaataccaaatcggaagtagtcgttcttttcccattgttgtcatatttattttgtaatcgcagaaccgcattctatcttatccaaagataacataattatccttgattacctgctgttgggcggaatatttttgtttgtaattaacagaaagtccgtccgtctcactgccggcataccggatgcgtctcgggtcagtgtgctttcctccggcaaagggatagatccgcttcgcctccttaaattctatatggtcttcgctttcgtgtagtttccgtaattctccaatcgtaatttccataaatgcaacgtgctataaaacatttgcaaaggtaccaaaaaatatgggagacacaggtcggtgaggatgtcaaggaaatgatacaggaggttttgaaatataaagtcaagtagcaaaaatgaggttgactcctcactctgccctcactttggtgtattgctattttattcagagcctatcaaaaggagtaaaaagagagccgtatcaaactctgttttcgaataatgatacggctctcttgtaataagacagaatactcaatatttaggtttctatattaaaacctagtatcaaattttccgtattttcgctcgcaatggcacttaaaaaattaatacaggatactattgttgataattcgaatgtaatcattcatcgttttagaataatcgggattttttttatcatatactatgataattgtatcaccgacagtgacgctctcattgagatgatatcgtccacgacctatatattttttattatcaactgaatattcgtagaaatagaattctgcgcgcctaatacgagctttttttgacaacacaatggcacgaactgaagtcttattattttttaaagacttatttggaatataactactttcataaatataaaaagcagtcccaattaaaatcaatatactcagtgcataccagaacaaatccgttttacttctattcatcatcaatctgtctatatatcggtttttctactcttagagcatcgtacctcgcaccatagtaatacaatcccgtctcctcatcgaattccttcgcgttgaagagataaagcatattccagatgctgttccgctcttcaatgaacacttcgccgaacggcacatactcgatgtgctgaaccacctcgccgtccaggtcggtgatgtagctttccgagcggccgaaacgatacggcatctcaaagatagcataattatccttaattacctgctgttgggcagaatatttttgtttgtaattaacagaaaatccatccgtctcgggtcggaaccgtaggaggcgaagtcgcctatctttccccataccacaacaccgtatcatgtccatatcccctcccaatcaaatatatgacatctatatatcaaagataacacaactataagacaaagataacaagttgttatctttgtcttatagttatcatatatttaagttgaagatatataggctgttgaagtgtcatgcacgaaacaaataaataaatgcaaaaagtaagggtttcgataccattcacaaataaaatttgtaactttgcgcaaaatggaagagaaagaaaataatattaaaccccgacatactttgttcagcaagattctgaacaaatatactattacgtttcttattttccttgtttggttggctttcttcgaccataacaatctagttgagaagtggcaattgaacaaaaaaatagcaactctaaaaaaggagaaatcatattatcaagaaaaaattgaagaagatacccgcaaaatcaaagaattgttgagcagcaaagaaaacctggaaaaatttgcgagagaacaatatttgatgaaaaaagcaaatgaggatatctttgtcattgtaaatgattaataacgtgggaagaattctagccatcgactatggaaaaaagaaagtgggagtagctgtcagtgacccttgccagattattgcaaccggattacaaacagttccttctcatactatctttcaatttttggaaagttacatggcccatgaatctgtagacctttttgtcgttggccatcccaagcaaatggataatacagactcagaaagcatgacatacatcaaaccctttttgactgcccttaagcggaagtttcccggcatccccattgtcatgtatgatgaacggtttacttccgtacttgcccataaagcattgattgagggaggcgcaaaaaagaaaacaagacagaataaagcattgattgatacaatgagtgctacgattattcttacatcctatctggaacaacaacgaaatttaaatcaataaattaataagatatgtttttaccaattgtagtatacggtcatcccattcttcgtaaaatctcagaggatatcactatggattacccggacttggaaaagttcatcaatgatatgttttatacaatggatgaagcagacggagtcggattggcagcaccgcaagtgggacgtaacatacgtctgtttaccgtggacggcagtgcattcgcagagatggatcccacatgcgaaggattcagaaaagtatttatcaacgcacatattacagaacgctggggtaatgaagtgtgccgaacagaagggtgtttgagtgtgcccggaatacacgaagacgtaaaacgctttgacaatatcaaaatgagctacatggacgaaaaaggcgaacaatacgaaacaaccttttccggaatcaaagcatggattatccaacacgaatacgaccatttagaaggcactctttttacagaccatttgtctgcgctgaaaaaaagactattaaaaaacaaattgacaaacatcagcttaggcaaattcaaacccacttaccgggtgattctaccaaaataaaagcccatgtttgttttaatataaaatttgtccgtagacatgcggacaaatttttatcatgtacaaccctcaaatatccagccagaaatcaccttttttatacctgctcttatttctcattgccggtataataagttgtcggtactttacgttaccgactagcacatttttagctatactcttcacaacaggaatagctttcaaattatctaaaacaggaactgatatttgcctactaatcacttttttctgcttaggcaatatcatctcaagcaatactcccgcacccgtctatccggataaacccattctattaaagacacgttgcgaacaagttctaaccggtaacaattacattctatcagctctagggaatcgatttcatttaagccatttctatacagattccacttaccaagttggggactcactggttttctatgcacggatatttccttttagagacaatgccaacactcatgaattcagttactctcaatacatgagccaacaatctgtacactatcgtctacaaccaacaagccatatacaaaaaacagggtattcaatcactcttcattcttttttcgaacgacaacgtacacatttgttagaaaaaacaacgattctggcatcagactcaatatgctctatgctaatgaatgctctttgcctaggatataagaacgatttagatccagacttacgcaatctatttatcaaaacaggaactattcacctgttggcagtttccggcttacacgttgggattatttatctattaatcatttttatcctcaacaggctacagctccacggtcccaaaagttctctactagcactacctctactctggagctatgccatactgaccggcttgtccccttctgttgtcagagccacactacttttatcctttattaatataggcaaagcaatatcacgcaactataatcctatcaacattctctcagcctcagcgtgtctgacattaatcgtacaaccctctgctctatattctctgagctttctcttgtcctatagtgcctattgtggcattttgattttgtatccctatctgtacgaactgccaggcaaattacctaaattcccctctataatttattcttactgctgccttaccattgcagcccaacttcccacacttcccatcagtgtctatttttttcacacagtcaatatcaatggttttcttgccaatctagtcgcagtacctttgaccactcttttactatattgctctgctatatgtcttatattaccttgcagcatcggattttatatcatacctatatgcaaattattatgcaacatcctaatcgattttttgcaatggataagtccttacattatcaatctccaaaacctattcccatccggattcggcatcatcattatatacggagttctattctccctcatcggctacctgcttttacacaaaaaaatgcttctacacacaacagcagcctttctgctattgcttttattattctgcacttgcaataactttcatctctctcatcaaaaagaaattgtcatattccattatccccgacattctgcgattctactgaatcacaacggcttttaccttccgcttaaaacaacttctgatacctcctcccatatgcaaccctatatactttataataaactaaagccactccccgtttcgcacggaatattaaacgaagacatattatggcaaccgccatatctttattattacggagacaccatcttactgccttctcccggcttgcctatacaaagttccggcaacaccctaattgtcacaggaaaccagactccacaacaagtatttgcagtttatcccgctcttccataccctcaaaatatcattttagacggttctaattcgttttataatattcgcctatggactaacttctgtaaaaaacataacctcatttgccacaatactccagacgaaggcgagatacatctttactgaaattaaacattatatccaggacaaatattattattttgctaaatttgcacttcaaacatcgaattgcatagaaatgaatattgttatagcaggagcaggttctgttggtacgcatctggccaagatgctcagtcggcaggaacacaatattatgctgattgatactgatcaggagaagctagaagaattggaaagtcaattagacatactttctgtggtcgcttcatgcacctctatcggagctttaaaagatgccgaagtggggaaatgcgacttgtatattgcagtaaatcctttagaagaattaaatattaattctgcaattcttgccaaaaagttgggagccaaacgtacgattgcgagagtcaataacagtgaatacctagaaactggaaatgcggaatatttacgttccatcggtattgactcattaatctatccggaacgactcgcagccgaagagattgttgcatcactaaaattaaccggcactcggcaaatgcatgaattctcagacggacggttgcaactactcggtatcaaactgtgggagaatgcccctattctcaaccacacattaatcaaaatggcacaaatatacggagcagaccaattccgcatcgttgccatcaaacgacacaaccataccatcattccccgtggtaatgacgaattacaatatggcgatttaatttttattgttacccgcccttcatatattaccaaggtattctcactttgtgggaaagagccttttgaaataaaaaacatcatcatcgttggtgcatcacgtattggaatcaaagcggcatcattacttgaaaaaaattacaatgtaaaaatcattgagaaagatcgagaaaagtgtattcaattagcagacaaacttaaatcaactctcataatcaatggagatggacgagatttaaatctattgcgtgaagagggtatccgtaatattgacgcatttatcagcgtcaccggttcgtctgaaacaaacattttatcctgcttgctagcaaaaaaaatgggggttaaaaaaagtgtcgccgaagtcgaaaacattgattatattgacttagctgaaaatatcggcataggaagccttatcaacaccaaattaatagctgcctcgcacatctaccgctacactatgaatgtagatgtcaagcacttgaaattcttgactttttcagaagcagaagtttttgaattggaagcaaagcctggctcaaaaattacaaaacacatgctaaaagacatcaattttccagacaatgctaccgtgggaggtgtatttagaggcaatgaaaccatcatcgccaagggtgatgtacaaattcaagccggagataatgtcgttgtatttgcacttcaaagtgctataaaaaaagttgtcaaatatttccaataaaatagcgtaatgataaactttcgttttatcacaaatttaatgggtaaattattgctgcttgaaagtgcgttcttatttatctgcatcatcatggcagcaatctacggagaaagcgatttacttgcctttgtctatacaacagcaatcacccttattacgggaggtgccatttgtgcatttgtcaaagtaaaggatcggattctagccaagaaagacggttatttcatggtcacaatggtttggatcgttttttctgtatttggctgtttgccgtatatttttggaggtacgctcacctctttcatcgatgcattctttgagaccatgtccggtttcacaaccaccggttcttctgtcattcccgatgtagaaattgtaccacatgccacccttttctggcgctcgctcacacattggcttggcggtttgggtattatcatgctctttattgcggtactgcctagccttggcatagaaagccgagatttatatgttgcagaaaccaccggtcctacacacagcaaagcctcctttacctttaccggaacagccagaaagatgtggatattatacgttatactcacattactgcaaagtgtattgatgtgcctcggaggtatggatgtattcgacagcgtttgtcatgcaatgtcaacaatgtccacaggggggttctccacaaaatccaacagcattgcctattgggactctgcatacatacaatatgtgattatcatattcatgtttattgccggcattaactttggtttagtatttacagctatcaaaggaaattggcgcaaactgattaaagacaatgaatttcaacaatatctgctcatcacaattgtcgccagtatcattattggcattggtctatatgccagcaactggggcagctttgaaaaaagttttcgtgatgcaatattccaagttgtgactattataaccacaaccggttttgccacagcagactatcttttgtggccaccattacttggtcttattctctttcttcttttcttcgccggagcctctgccggttcaactgccggaggattcaaaatagtgcgagtttaccttttattcaagaactcctttacagaattaaagcgcatcattcatcccaatggcattattacggtcaaatacaatggcaaaagtgtacatccggacattatgacaagtattatgggatacgctatcttatacatgatactttttgctatcggcagtcttatcatgactctttttaccgaagacatcatcaccgcctgcagctctgttatcacttgtatgagtaacgttggtcctggttttggaagtatcggacctatgtttacatttgcacatctaaacgaattcgccaaactgttcctagctctattaatgctaataggacgtttagagatatttaccgttatggtactatttacgaaggcattttggaaacgctgataaaaacaagccatcactttatgcagatagcctggattcaaattatcatttaacaatcaatacctttacgagatagaacaccattcttataatagtgtttgatttcgcacatatctgttacaacatcggcaatatcaatcagctcctgcggggcatagcgccctgtaataataatttcagcctctgaattacgtacctgcagatcctgcactactttatccaccctcagcaatcctaaagacaatgctatagtcagctcatcaaaaaccaaaacatcccatttccctgactgcaacacttccatacaatgcttccatcctttctgtgccattaaaatatcttccgtcgcaatagctccatcgaaacaacagccatttcccaattgttcaatacacaaagagccaaaagaagcatctgcatcatccaacaaatctaccaaacgggtttcactataacacatagacttcacaaactgtcctatatagacattacacccagcgcaaatagcccgcaaagccaaaccaaaagcagcagtcgttttaccttttccattacccgtatatatatgaatatatccctgccgcataatataagtatagaatattaatttatttcagttctcctattccctggcggataatttcaatatcccccttagaacaatcaacgaccgttgaagcaacattatgaccatatcctccatcaacaactaaatcaaccaacttttcgtatttttcatgaatcaattccggatctgtcatatattctaccacatcatcatccgatttgacagaagttgttagcaaaggattacccaactcttcaacaagagctttaacgataaaattattcggaatacgaatacctattgtctttcgccgattcatcattacattgggcaatttatttgttgccggcaagacaaaagtaaaaggacctggcaaattgcgtttcatcactttaaatacatcattcgtcacttttgcatatgtagcaatattagacaaatcctgacatatcatggaaaagtttgctttctctggctttacccctttcaattgacaaaccctttgcacagctttcatgtgattaatatcacaccctattgcatatattgtatctgtcggataaatgattaagccaccatcctttaagatatcaacaattttgaggatatccctttgattagggttatcctcaaataatttaattaacataccggaaaattaaccgtttacttttttataatcttccaagaatttagccaaaccgatatcagtcaacggatggttcagcaaacctttaattgcagacaacggacatgtagcaacatcagcacccacttcaatacactgaataatatgctgtgttgtacggattgaagctgctaatacttgagtttggaagccataatatgtatacatatcaacaattttgccaactaactctatgccatcgcttgttatgtcatccaaacgtcctacaaacggagaaacataggttgctccagctttagcagccaacaaagcttgtcccggagaaaataccaatgtacaatttgtgcgaattcccttgtcggtaaaatatttaatcgccttgattccgtcagcgatacaaggaactttcaccacaatattcggatgcaacttagctaactcttctccttctttaatcattccctcataatccgtagcaatcacttccgcactgacatcaccattgacaatattacaaatctccacataatgttttttgcaattttcagcacctttaatgccctcttttgccattaatgaaggatttgttgttacaccgtccaatactcccatttcattagcttcccggatttgcgccagattagctgtgtctataaaaaacttcataatctcaaatattttgtagtttactattacgaaacaaaaataaaatattctgcacaataaaactaactttactccttacattttcatcacttttgattattatggtaaaaaaattaattttgtctgctttatcaaaatcaatcatactcaacacatattagtctattatgactttaactcaaatattgttattaataatactaggactgctatcaggattcatcaatatgtttgcaggaggaggttctatgctagttgtacccttcctcatatttttagatctacctgcaaatatggctaatgcaacaaaccgcgtagcaatttttttacaaaatattgtttcaacaacaacattcaaacaaaaaaagatcctagatttcaaaactgattataaactgcttattcccaccagcctaggatgtgctatcggggcatatacagcagttgatacccaagacgatattttagaaaaagtaattggaggactactgattatcatgtttttcatggtgctactagatcccagctcatggataaaaacaaatatcgaacatgcaaaagccaaaaatccaatcctacgcttcattattttcttgggcattggtttctatggaggatttattcaaattggtgttggcttctttatgctcgcaggccttgtattaggctgcggttttgatcttttaaaagcaaacgctttaaaagtatttctaatcctgatttacacttccattgcgcttattatcttctccaatcatggattgatcaattggcaaataggattcattctatcttgtggtaatatggccggtgcctggataggagcacgacttagtgtaaaatggggagcacgctacattcgctacatactcctcatttcactgattcttgtcgcactaaaattatggggagtattctaatttatgacttaaaaaatgttgacagaatatccaatacaataggtttcaaaccactgaagaaaaattcaacagctatcaccatcactattaatcccatcaaacgcatcatcacattatttccagtttcacccaacaacttaattattcgagacgaacttctcaaaatacaatatactaaagaaatcacaaccacgacagcaaaaaccatcatcaacttcatctcccaacctgctgctttatgccacaaaacaatggcattggttattgtaccaggaccacataacatcggtattgccaaaggtgtcacagaaatatcatttacatagctcttcacctccgactctttcacttttgtttttactaatcgcgcctgcaacatatccattcccattattaagaatataatacctccgacaattcgcaaactatctatcgaaatgccaaaaaaacggaatagaaaatctcccgaaatagcaaacatcatcataatcaaaaatgacaccaaagatgctcgcaaggctactcttttacgctctgcctcatccaactccattgtcatagtcataaaaacaggcatcgctcctaaaggattcgtcaatgtaaaaaatgacgtaaaacacaataaaccaaaggttaacaactcattcataattattgatttttaactagccgcaaagatagacattcaaaatataattccaatatccaatattacaattcagaacaagaaataatatttcttcacgcaaccattcatcattttcttcgtcttataaacgaaaacagaaagaatagtaaaatgaagaataataaaatttcgcgcaaaaacattgatagaatacattgggtcttatttatcatcattgttgttttattcgcaaatcatgaggccaaccgcctacatcaacagcagcctgatttagcaaaaaacatacatgatactgaaaaggccatcagtgtcagttcctttttccctatgcaagcaaatcgctgaataaaaatctttccccttaaaagaaagataatcgcaatgtctgaagcaattaaaaattaagtacgcactcaaacgagtaagtacagaatttaaagattatacattgacatcatgggagtctttatttgggcaattatattgctatttatagcaattgatatttttggcaaagacttgattttctttatcattatttttatcccttttggattcttccagacactgataaaaaataaaaagatacaatcattggttgcaatagtgtatagtgttgttgctttggcatccacatatttgtatctcgaatgcatgtataataacatgtataataacatgtataataactgacaaaattttactccacgcatcaatagtcgcttttcctgtcaaatatgtacagtctttttgtacgtttttccgctcaattttcagtaaaacacatggacttatttaataaaaaaatgagtcacagcatttattgcaacaactgtgactcattgattttcttgcggaaagaaggggattcgaacccccgaaactctttagaagtttacacgctttccaggagtatatttactatctgtatgtcaattagttacagagatgtttttataatttgcacgttcattgcacgttctgtattcaaaatgtctgttatttcatttctcccattccggtcagctgcgttcaaatacaattcattcaacgccatgtttattctttattgtatcatcaatttcgccaaatttatttttaatttgtttcacaatatcacgagcatcctccatgtctataatttttaattcattaattgtagattgcatcattctttttcttattcttatccattcgtcattacttaatgtttctacaatagtatttgcccactcaacacttttaatcatgtaagcattctcattcattttattggcataacaagcaatgttgcaaaatccaataaatgcagtatcattattgttattattcatattttccaaagcagcagaatacaaatccttcaatatagaaaattctctttcgtgtgctattttcttagcaacttcttccaatatagacacctttagattatccaaattactactaatttcatttttccacatctctatattttcagtagttgtacttttgaatttgtctgtttctattcttatctgtcgtacatccaaaatcgaatatatattccaccctatcaacactgtcacaagcagtgccaatatcccaaccaatacaccaagccaatccatttttataggctcacacctacacatagaaatgaatagtgctattagtgagattataatagctaaagcactacagtatttctttaatttattcatcacttattcaaatctgaattaccagctacttacatcaccatctggccaaaaatgagcatgtttaaatttaccctctgcaatcatagaagaaaactcattgacattatcttgattcaatatgcaatcatgacctgtatacactttagaaatacaagataatataccaaacaaactgtcatcttctcctgtatagaaaagtcttatttcatgctcatatgcccaatctggtgtcttaatactaagatagtctttaaatgtcgcaatattcgattgccaacttttagggtctgatattggcatatatttaatttcttctatttctatatctttatatttttcttttagtttttcaatactaaactctacacaaacacctgtgtaattcccactatagaaataccacatcggagcgattttccatgaagaagaaaaacatgcaaatttcaatagtcctctattttctttctcaaacttactgtaataatctatccctctttcccgaaagtcatttgttcttccaacatcagaaaatatccatttattagttttcaccaaattcgcaaatttttctattgtcatataattgtacaaaaatcccatagttatcaagtttcattaattaatcattagtaccatcaaacataaatttcatgatttgctctttttgaaccatctacttcctttccatcagtacattaattaatctctctttctctgcgagtagctcttccaaatgcttcactcgctctgcaagaatagcatctgtacctacagatacattgcccatcattgaagctgggctaaaatctccatttgtttcaactgtattatttgatagttttgatacatcgtcatcaaaaaatattcgtatgtctgctttcaataaaaatgcaatcttttctaagtcggtagcttgaattttgttgttcctaatgcatctatgcaagttttgctcgctcataccaacatcggtagcaagtttctttagtccaccatctctgttttcgcttaattttctaataacctccaagttcatgactaacaagtatttatgttgttcgactaaaatttaatttcgcatacaccaaattttatgacgaaaatatttgttcgtcatgaataaatatattagctttgcaccataaagttaataaataacactcaaaaaataaatagcaaatggagaaaattcacactggacaatcaattagaagtattcttcgagagatgaaaataggagaaaccattagttttccgatatgtcgtttatcggtaattcgttcaacggcctctactcttggccttgaaatgaccaggtactaccaaactaaacagagcaaagaagcaagaacaattagtgtaaccagaattgcataaccgccatgactaaagcaaatatgatgaaagaaattttagtaagacagggacacaaaacattactcgcaaagatatgcgggtgctctatacaatcagtccgatttgcattaagaggaagtctcaatactgacttggcatacaagatacgcaaagaagccatcaagattggtggcgtagaaattaaaacaggtagaaggttatgaaaaagataacatacggcagaaaaatagaagcacctgacgaccgaatcaagaacttcgccaccctctacactatagagtttatgtcagagaaagatgtaatgaaaacgcttggcatcggtatgtacacaatgagaaagtggtacgagatggggttgggtctttgtaaaattgatgataagaagtttatcaaaaagagtgagttaaatgagttcttgcaacaattcatcacaagagcagaagtagaaagaataaaaacaatgctatgaaaaactttagttatcccttcgccctactgggcatcatcggcatcatagccggcatcttcaaagcgggtgcagagcatcagctttggttaggcttggttagtctagttatcgcattggcattcgccttctatggcaagtccaagaaaagtgaagagtgggaagggtggatgtaacataagaccgggcaaggatggctgcgattctgttttattgttttcgcacacgttctttcatactggcagcagcggttcgattccgctcccggtcacaaccaacagagggggaactcttttagctcagttaatacctccccaaacaacactaactgagacaccatgcaggtgaaagcaagcatcgtgatgcgacacacgttaacagccgtgagttcttataagtccggtgaacatagccataatgattcttttctcaccggacttttaaaaatgtaactgtgaaaaactcatttgattgaagaagtaattttttggttgattagccttagccctgtcgagagatagcacaaaaggcgaaattttaaatcttaaaaatcatgacaaaagaaaatttcgagacttccataaagtctcaactcgaaggcaaagagaacatcagtgttgctgatgtgatagaggcagcatacaagctgcacgctgaatcaactgatattgtctggtctattgtatctgaccgagacaaacaattggagggtgcaaatgcgaaaatcgccaacctatctaagttggcaaaaacgcaatcagaagccatcgctactttactttaatctctcttcctaaatggttattccggggttcgattccccggcaggaacaacgactgttctttgacatgttagtaggcttaaacatttactcacttagccggtgagggtcggtgaacctaatggagacactcattaggtggcagcaatgtcgcacgtcaataaaggtgcattatgccgacaagtgaatgactgagttttctttatacatagatttttgcttaacagcacccggggaacaaggttcttgcgggtgcttttttcattacaatggttgtacgagagttcgattctctcgatagtgacaaattgcaatcaagcaatctataacttaaaattgagcagatatggctattattagaaaaacagacatttttcctaaacgaccagttataatcgttatttacggaacaccgggtgtcggaaagacatcattattcaacacaagtaaaaatcccattctattggattgtgatagaggcgcagaccgttctgtcaatcgacaggacaccatcgttgcttccaattgggatgaagtattgcaagaccaaggggaaatcaaaaactattccacgcttggtattgacactgcaaaagcagtattggatgactttttaatgacccacgtcattaagaatgactataagctaaaaacgaacaagttgaaggcttatggagcaatcggagatgagtttaaactcttcattaatgcccgccgtgaagagggattggatattgtggttatcgcccatgccaaagaggataaggacggagacataattaagatatccccagatgtaactggacaatcaaaggacttactccttcgcattgccgaccaagtgggatttctcacgatggtaaacaataaacgcacactcacattcgagcctacagataaaaccatcggcaagaatgtagcgaagattcctacgcttgaaattccggatgagaacgaccctgctttccttacttttatggcagacatcatagaaaaggtaaaagagagcgttcaaaagcagtcagaagagcaaaaacaagtcctagagaagattcgtgaacttacattgagcatcaaatcaatggaaactcacgaacaagcgaatcagattcttgctgagatattagagttgaccaaaatgcaacaatctggattgagaagtcttttcaactcaaaaacgaatgagttgaagttgcagtacaacaaagcaacaaaacaatatgagccatgcaagtcagagtaacgcagcttgaaaagttcagaagatacagagattcggtatcttcttttgataccgaacagagtgttgtagatactctttcgggtgtattcaaagggaatgaatacacgtggattgggtctgcttttcataagattgtagaaataggcgaatctgcttggaacgatggcatagtaaatgtcgaaggcaaggatattcgattcaacgaaagccaaaagaatgcggctatcgcttatcgaaactccatgccggaagcgtttcatgaaatccgattgaacaaggtttttaaaacctctttcgggaacgtgactattagcggatgtgccgatattatccatggcaacattatccatgacatcaaaacaaagtattcttctcctgtgcagcaagaatacatagacagttgtcaatggaagttctatttggaaatctttgaggcagacagattcgttttcgacttgtttcagttttgcaactataaaatagatgctaacggacttgatgttagcggactaaagttaaaagaaatcgatccgattccgtgtttgagatataacaacatggaaacagacaacaacatattgttgaacgactttatggattgggtcagttcaagaaatttgtatcacttattaaagaaataacatgtttcagataacagcagcaggaaacatcggcaaagatgccgagttaaaggaaatcggaggcaacaaatatgcctccttttctattgccattcaggaacgcacaaaggatggttctaaaaccacatggataagagccatgaagtccgacaaagaagggaaattaactccctatctgaccaagggtatgaaggtgtttgtcataggtagaccgacaatttccgcttataagaataaagatggtgaagccgtcggagacttgactatctgggtgaacgaattggaatttggcggttcagcaaaggctgacaacaatcagcaatcacagcagccgttcccgcctctccctgataatgacgatttaccgttctaatgaaactaaagttattaaataccatagcagggttaaaacccctctatgatgaagactacgaggaaaagaagaagttgaaacttggcgaggtttatgaggttactatcaagcagcctcgaaaccttgcctttcatcgaaaatacttcgcccttatcaatcttgcttgggaatatcaaccagagaaagtggtagaacatttccatcacaatcaggatttattccgcaagacggtagagatagcagcaggatggtgtgatactgtctactccattaaccgcaaggaatgggtagaagcaccgaagtcaatcgctttcgacaagatggataacgatgaatttaccctcttatacgatagagttaaagacattctctatgcatacttccttaaagatgtaagcacagaggagttcgaaaaacacttgattcaattctaaaaaatgaagtcagtgaacaataaaacggcattagaaatcataaaatggcttgaagaattgaaaagcaaactacctcccaatgagattaagtccagggagaaaataaggaagataaataaagccattaaaatactttcccatactggtcatgaacctaccctttgatgtggggtatgggaactatgaaaaagacaaatcttaaaacaaaactagacagaatattctctgaatacataaggctcagagatgcaagtccacaaggtttcacaaggtgtatatcatgtggcaaggtagttccatggaaagaagctgattgcggtcatttcgtgaatcgttctcatatgtcaaccagatttcacgaaaagaattgcaacgcacaatgcaggaaatgcaacagatttgatgaaggcaatccaataggatatatgagaggtcttgttgcaaagtatggagatggaataatagagaaacttgaagtattaaaaaatcagactaccaaatattcagagtttgaatataaggtactgatagactactataaggaacaagtaaaaacattacataaagagaaaggaatatgaaaccatttaacaatgaagatagcaagcggttagaattagtcactcgcttatatcacgaggaaatccccttggataaattagagaatttcctgaatcaaagcattcgggagaagcgaaagaaagagtttaggcaaagagctattgcggaggctttaaatagttaaatcaataaatatatggaaaaatttttaggacaggacattccggaagatagacgttggcaattccttcaagataatgccgatgctattgaaaaaatcggttacacacatcgattctctccggaagaattagctcaaaagaaagaggcgttagcggaagtttcgatttccatcaacgacattgaaacggaaaagaaagatttcatggattctatcaaagagcgtctcaaaccgcttaatgaagaaaaacaagaattgcttgaaaatatcaagcaaggggttgagtatagaacaaacgaagaatgtgtaaagattctggaccatgaggaaaaacttgcaggattttacaacaagctcggagaattggtctatagccgcccgattatgccccaggaaatgcaaaaaacaatattcactatttcaagaacaggaacagataattaattatggaagcgaacaaattaaacctgattgttcccaaagattataatgggacaccaatcgaagttatcattagggacggtaaagcaccggttgctttagatcccaaagaaccaagagtagtagaaatttatggtacaattacatcttcattaagatggctggaaaaacggattcagcttatcaatcaaaaagaatcaaatatcattattgatagagacaacatgaatatcagattgataataaacgaaacggatttctatcgaacatcgatagaaggttctttgcagccatccaaggaaatgatagagttcggcatcaattctgaaaaaaaatgggaacctatcaagctgtctcaattctttaaaatgcatagagctttcttcaaggacaaaacagaaaacatgatgcttgtttcaacattgaaaagcttcaaagccaaagtaaatcaagacatagaaagaagcaaggaagaaaacggcagcagggtagacaattattctcaggtagtagattccaatttgcctaaatcgtttaaaattaatgtgcctcttttcaaaggttttgcatgtgaggaaattgaagtagaggtttatgcagatgtagatggcagggatgtgtctttatctcttgtatctgctggagcaaacgaaaccatcgaagaatacaagaacaacgttttaaatgagcagataagattaatatctgaaatagcaccggacattgttatcatcgaagtgtaaaaattcaaagatgcagaataatacctgcatctttttatctcatgaaacatcctcccaaacaaccaacgcaagcaaaacaaccctccaattgtctctcctgcatccactgcctttctattatctggggcaatcacattgattgcgctactgctttagttccagtggaaaactgcaaggacagagggattgaatgcccggtttctttttgaaaccgggcattgtggcgtaatgtgagaatggctgtcacatcctatatggttgccctagatgtcggttcgattccgatatgcccacaaaaaaagcaacagaatcatttggcattatagaaagaagtcgtatatttgcagcgttcatcatacatacaggcgagtgaggctcgcttaacagtgggcattttttatgcttgcaatttttgatttgttgcaattatagcggctatctaaccccgtgtggagtgttaatgcacccacagcctgtatggtgatgaacgacgggaagtggatagccgtttttctatcctataatgccaataaaattcgttcatcattatggcatctattgaaatttttaaaaatgaaagtttcggagaagtaagagtatccggaacaagtgaagaacccctattttgcttgatagatatttgcagtgttctagaattaggcaatgcaagtcaagttaaatcacgtcttgacgatggggtcattactaatgaggtcatccccgatgctttgggaagaatgcaggaaacttcatttattaacgaagatggtttgtatgatgttatccttgatagcagaaaaccacaagccaaagcgttcagaaaatggataacgtccgatgtccttccatcaataagaaagaccgggcaatatcaatccaccgtctccctctctccttccgagttaatattaaagctcgctcaaatcaacgttgaaaacgagcgaaaggtaaaagaactcgaagaaaagacagaagccctacaatcagaactaaacgaagtaaaacaacgcacaactaccgacctgcaccagtctaccatcgtggcatacgtcacaagaaacaaaatctcgttagatgtaacacgatacggagcaatgggacggaaagcttcttccatttgcaaaaaacgaaacatcgaaatcacaaagattaacgatgtgcgttggggaaaagtaaacgtattccccgatgaaattcttgacgaagtttttgcaaaggaaggaggcaatcatgaatgacaagaaaatctccatctctgacatcagggatttaaattacatagccaaccatctaaaaggagaagaagctgtcgaggaaatcattcggcttattgattaccccgatgataattacgcgcaggacaatgccctgaaagccgttgtaagattctattccaacgtccgatacttggtatctcaaatgaaccaagtattcaacaaacaataacaagcaaagcaacatctaccggatgcaacatcgtgtccggtagatacattgtataaccaatcaaccgatataaacatgatgacacaaaatataagaaatggctaacaaagaaaacgaacacctaagcaggtatttcccccacagcagcaacgccaggaacacagacaagctgattaatttgcgcatgcaacacaaggctgccggatatggtgtgtatttcatgattctagaacggctgagagaagaaccggaatacatgagtgtcaaagattataacatgatagcctttgaccttcgtgttgatgcttctctgataaaatcagtagttgaagattttgggttatttgtctttaccgaagatggtaagtacttctactccgaaagctttaaacatcgaatggaaatcatggattcaaaaacaaagaaattatccgaagcaggcaagaaaggaaatgagaaaagatggggcaaaaaagatgaaattatcgccacccaatcgccacccaatcgccacccgatgcaaaaagcatcgcaaataaaagaaaataaaataaacaaaaataataatcccccctataatccccccggggacgatagagagattgtttattcatcggaaatgctgtctttatccgagcttagagggataatatctacagacggaccatggaaagatgtaatagccatgcgacatggaataaaccttcaaaccgtaaacacatggatagaaacattctttcagcacttggagtgctccggagaaaacatgaaatctctaaaagacttcaaacatcacttcacaagctggctgtcaatccagctttctaaaaatcaaaacaatggaaattataagcaaagaaaaccaaacacaacagaatcagatttcgattgatgttggaacgaaaatagaagaactccgtcaagagtggaaggagttcaattatagaaattcaaagagaatgccgactattctactctcatacccggattttaaaaatttgttagtggcttttggtagtaaataccttgttagccgtggagaatcgataaaattcgagatattccctcaaaacgaggatgtaatcttcaacatctatcggtatttcagaagagattcatcgttcgttggagatttaaacaagggaatccttttgaatggagcatacggaaccgggaaaacggctctcatgaatgcaatcgtaggtgtgtacaactactgcacagacctagacaccgacaacagatttgccttaaagatgcgaatcatgaagtctgataagattgtagaagaatactggaaagaagataaccagtacactctcaacggacttcttaacggtctgttagttattgatgagctgggcagggagcagaaagagataatgatttacggaaattccgtacgtccaatagcctctctccttcacgataggtacgacagaggcaggactacatttgccatctctaatttcacgatgagcaatttaagctctgataatcactacggcaaaatgattggagaccgacttcgtcagatgttcaatgaaataacccttaaaggtgattctcttaggaaatgaaatcagaagcattcagtgacaacgaaatccaagtaagggaagacttggagaaactaaaaaacaagggcataacatcacccttaactccgaaaaagaatgagttgaggattggtaattgtgttttctacccaatcaacgaacataggagaaaaataatcctcgaacgatacggctttgaatcggaagaggaactggaaatctacaacagaaactatggaaaaaaaaattaaatcatctgaaatcgtagccaaagccacagaaaagattcccgaagatatacggctcaactacacatacggcaacgtctatctcttggatgagatggatgtatatatcacccagcttcgttcccatgcagaaaaagctggaatcatgaagagggaaatcaaaaagcgaatcaacctattccccgtgtacgtccaaaggtatcggaatagtctccgtactaccatgtctgatgatttatacgaatacatcacagacaatgtgttggacgaaatgcatgatgaatttgagaatagtctaaaggtactcttctactccaccaagcggcaagtagatagggttatcagcaatagcaacctttcatctgccattgccgaccttacaatgatttaccttattgcatctctcgaaagggagcgtgatgtttggtattgtaataaagtcaacgaaatgtcagacatcccgatgtttcccattcacgacccacatgtcgctgcaattcggcagtgtaccatgtatctgttgaaggcattattacctaatgatgtctctttcatggagagtaaagaaatgatggatgcctttaaaattttcaaggaagagataaacacaagtaaaattgaatttaaagtagcatgagcgaacacaaatttccttacaactggaggctgtcagacacccatttcaccaaagacaaaggcaaagtattctcatgctttgcttgtggggggggtagttctatgggctacaagttagccggattcgatgtgataggatgcaacgaaatagaccaccgcatgatgttcacatattgcaagaatcacaatccgcgtttccctttccttgaaccgattcagacattcaaggatagaacggatttaccgcccgaattgtacaatcttgacattttggacgggtcgccgccttgttctacattttcgatggctggtgtgaattgcgggcgtgaaaaaagttggggcaaaatgaagaagtttagagaggggcaagccgaacaagttttagacaccttgtttttcgacttcatagaccttgcaaagaagctgcaacccaaagtcgttgtcgccgaaaatgtcaaggggttgttgcttggtgaagccaaggattatgtaagacggatatacgagggcttcgaggatgccgggtattattgccaacattggttgcttgatgcacaaaagatgggtgttccgcaacggcgtgaacgggtattctttatctgtttacggaaagaccttgcagccccatttttggtgatgcaaagccttttcaatgatgtgccgaaattagaccttgacttcaaagaagcatcaattatgttttccgatgtcgttgcgggcgttggtcgtgaaataaaatcaaaggagatgcggaaaagatgggaatcaagattgccgaccgatgatgattttggtgatgtaacaacaaggctttatggacggcgattgacattcaacacgcaatttgcattccttgaccgtgtgtgcaatactcttacgggaaaagaagagtcaacggtgcattatgataaaccgttttatctttcgacccaagaagtgacgacaattgcaacatttccacaagactacaattttgcgggtaataaaccccattatgtgtgtggaatgtccgtgccacccgtaatgatggcacaagtagcatcaagggtctacgaacagtggctttccaagctatagaaaataagtaacactcccacatcccgcccttacagataatctagtattaacaatagttgcaattttgatagggaggtgggatttttaaatcataaacatgaacgaagacgaacaatttaaacgatttgccggatgtatgtgtctgttcggcattgtgatagtcatgatgtttttcgtggctgcattcatcttagtgtcaactttaaattaatacccaatggcaaacataaaagagaataagaaaggattcaagataatccaagtaagcagaatggaaatggttgataaatgtgattcttttggcatttgtgatagttgtaacgaaactgccgaaacaggattctacatagctgtattgaatcagtggttttgccccaaatgctatcaagattggtatcacagagcaagatgctacccggaggatgttgctatcgagaataagaactttgagctttacaaaaagatttttggaatatgaaacctattctaataaaatcatgaaatgtaaatacatatacactgaacagggataaaaaatattaatacccggctgcatggccgttgcggtatcaggacggatggaagattgcacctgtagaagtgaaaagacatttgcgcagtttgaacgtgaggaatacaataaaacagtcaatgctttgcgtcaagaggtcaaggaactagaaaaggaaaatgcacaattaaatagaattatcaaaaagctaacacgaaggaaaaacaaccatggaaatcagtgatatatttagttttaaagcatcaaaatttgtattaaattttgatgcttcagttaatataaaaaagtatacagctaaacctataagaaagggagctggtaaaaaaaattaatcaaaaagcaacgtaaactattaaacatgagataaatattatggaaatcaaagaaacaataaaaggatataaggggtttgataaagaccttaaatgcagaggttttcaatatgaagtagggaaaacatacgaaacagattatgctaaaacatgtgaacatggatttcatttttgcgaaaacccatttgatgtatttggttattacccaccatgcggaaataatggtttaaatcgtttttgcgaagttgatggatgtggggaaattgacaaagatgatgattgctccaagatagcttgttccaaaataaaaataggaacagaaattaaattggatggacttattaaagccggagtcaagttcatttttgataaagtcaaatggaacgagtgtaacacaggaaaccaatcagctgctaccaacacaggagaccaatcagctgctaccaacacaggagaccaatcagctgctaccaacacaggctactgttcagctgctaccaacacaggagaccaatcagttgctaccaacacaggagaccaatcagctgctaccaacacaggaaaccgttcagctgctaccaacacaggagaccaatcagctgctaccaacacaggaaaccgttcagctgctaccaacacaggctactgttcagttgctaccaacacaggagaccaatcagctgctaccaacacaggctactgttcagctgctaccaacacaggagaccaatcagctgctaccaacacaggagaccaatcagctgctaccaacacaggagaccaatcagctgctaccaacacaggctactgttcagttgctaccaacacaggagaccaatcagctgctaccaacacaggaaaccgttcagctgctaccaacacaggagaccaatcagctgctaccaacacaggctactgttcagctgctaccaacacaggagaccaatcagttgctaccaacacaggaaaccgttcagctgctaccgttaatggcaaagattccattgcgattgtcacaggcaaaaatagtaaagctaaaggctctttaggatgctggattgttttgacagaaagaggcgaatggaatggggaggcatatccaatcctagatgttaaagcatttaaggttgatggtgttaaaataaaagctgatatatattacatgctagttgaaggagaattaaaagaagtagaataatcatggaaatcaaagaaacaaacctacagtcagcttacaacactgctgacgaaaatgggaaacagatgctaagagcattattccctgatgtgagattcttaaacaatgggaataaacagaaacttcctataactgaacgcatcaagacttttaatgatgcttgttatgaattaggtgaagagcatcctttagtaaaggattataatcttatgtctcgtacagaaagccctaatttaaaagcttatttaaaattgcgcatcatttgtgctgctttaaatgaaaacgaggagcttgagataggtgatgataatgtctattatccttggttttatttttatactcaatcagaaattgatgccatggatgaactagaaaaacaagagcgtcatttcattgatataagcgagtataaaatgcaatatgcagcttactgttatgcaggtataaatagcttttactcagataccgcatataatcttaacttttcattatgccttaaaaatggcgaattagcagaatattgtggaaatcagtttattagattttgggctgatttaaaccttattagacgataatcatgtggatagaaaaaacttcctacaaagaagatataatgattcattacatcataacggataacttatgtataaactgcaaacacaacccaaataattattgtcctattattggttgtgatggtttatgcaagaatagcaacaaatcggtagtacaatgttttaattttaaagacaccaaataatcatggaaacaaagatgataacaattccctttgatttagaaagggcaaaaagaatacaggcaggtgaagagcctgggaagatagtgaccagaaccggctcaaatgcgagaattatatgctgggataaggtagatgatgaatttcctattgtagctcttataaaagatgataatatagaattaatatctacatacagaacaaatggcacgttccgttatggtgataaagaattatctgacctcatgcttcaaattcctcaatatgctcaattcaaagacggagatgtgctttcaaatatagacggatattttgtcccagaaagagtgagggacaagtttgataaaattataaacgagaccatattggaaatcaaaaatgaaatagaggcattatgaacaaactaacattagaagcagcagccagggtatattccggcactgctcacgatgaaaaaccgcaccctatacacatcgaacggaacaaggctttcaaagcaggtgctgaatggcagcgtaaccatgtgtggcataaaacatgtgatatagcaaaaccaggtaagcgttgtttggttgaatacatggacggagacggaaatatctgcatccgcattgattggcgtactgaatacgaatgggtaaatgcttcccattgcgacaagatatttcgctgggcatacataggcgatatttctcccgcttcctttgatgaaatattggacgagaacaaagatgtgttacaacgattaaaagataaataattatgagcgaaataacaattaaaaaatcagacatcgaatcagcctataaggttgcttcgaatgagacaaagaaggtgcttgattgcttatttggttacgaaaatattttcatgagcaaaccgaatctagatgattataagagtatcaagacgtatgaagatgcgtgtgaagcacttggaatggtgccatatctgtctgctaaaaacaatctcgttatttgcgagaacgaaacagagcaatataaattttggcaaaatatgccacctaacattattgcccttatgaagctcgaaactatcagtcgtgctctatggggcagaacatgggcacctgagccggatgcaaatggctcaaagttattctattttcctgtttttacactctacactaaatccgagattgatgatatgtgtgaggagaaacgtgtgggcttgttgtctactggtgcgggtgttggtgcgggtgttggtgcgggtttcggttttctgtacacgagttttcgttcctcgaatacggctgtgggcgatgggttccgcttgtgccaagagacagaagaaaaagccgcatacttcggcaagcagttcatcaagttatgggcagaatacttgcaatttaactttataactggagagagagattaaaatggaaaagatatacatatccgttcccatctccgggaggaacattgaagatgttgaatcagacatcatatttgcatcggcacagatagagaaacacggatgcaaggcggtatctccattggaagtatcacccaatcccgatgcctcatacgaagagcatatcggcaacgacatgactgaattgctacgatgtgacgctatattgctcttggataattggcagcagtcaaaaggctgtttgcttgaaaaccaagcagcgttattgtatgggaagaatcaatactacgggatagatgattttgtaaacaaaataaataaaaaagtacaaagaatcagattggaggaatccaccaaaattgaagaggatgaagactatgaatatagctacaactcaggtcgtgcgttagattaactcagttttttttataaacaccatgaacagacaaataaaatttagaggactatccatatcaaccaataaatggctgtacggagacttattgcgaaatgaaaatggagatattgccattactcctccatttaagataaacatgcacaacgaatgtagtgtattggaagttcatatcagcactatcggtcaatgcattggtctcactgacgcaaacaacaatgaagtttacgaatacgacatcataacagacggctccaagcgtaattacgttatattctacagcgacatcaatctatgctttgaacgttgcccggtacaacactacaaatcatctgaaagggatagagaaacattctcacaacctatcacctttgaaaattggtacaagattaaacgttacgtgattggaaacatttttgacaacccgaatttattagaataatgacagaaaacaagattgtaaagaaattagtaaactcgcattgtttgtgttaccaatgcgaacacatagaatattgtaaatttgggaatggagcaaattcttctatcgattgctgtgcatgtcctgccgatgagtatgccaacggcatccatgctgcatacaaacactttgcatctattccatttgacgaggctgtaaaggaaattgccgaatacagccgataacacaaagcccaaagttgcaggactatgggctaaatgtctttctcgtggagaacggacaagaaggtgacgaatgacagttcgccgaaaggaaggaataaaacttccgttaaattgcagtacaaatataacaagtttagtttgtaacaaacaaaacaattaacgattttaacaacaaaacaaatgacaacaaactggaacactctccgtgaccaagcctattccatcgcttgcgaacacggatttcacgacaaagaacaatcactcgaacattccctcatgttagtgattaccgaactttccgaagctatagaagccgacagaaaaggcaaacgagcaaacaaggaacaattcctccgatacgagaactccactacatatagacactgctttgaaacctatatcaaggattcccttgaagacgaattggcggatgctgtaatccgactgttggatattgcaggattgtgcgaaatagacctctccataatagaacatgagaattatcctgatacttattttttgaaggaactactacgagaatatcataaatcgtgttctgttagcaaactcactgaaattgcatatagtgcatgcacagtaataacagatttctctttgattgaaacaaagattccacttgcattatatgtagtcaaaacatattgcgccatcaggaacatcgacctcctttggcacatccaaaagaaaatggaatacaacaaaaacaggcctccgctgcatggcaagcggtattaattcgcatccatcagacacatcatgactatcagcagacggcaatactcccaataatagagattgtcatctgctgacaagatgattctatcaagcttttcgttcatggcttaacacattttgaatcttatcttctgtaaaaccgaacaaggcggcaaatttcttgaaaccgctcaattgacccttgggaataagagcatacagactgttcgccggtgtacggctattcagagcatttttgatttttttctttcgcatacaacttttctctgcaatgttcacataaaaaatgacgggctacggaaaacatcttctgacccacatatccgctcagatactgcgcctcctccccatacgggtctatacccatacagtgggatatatgcatacacagatgtcccttttcatggtccagcgaattttgaaactgcgctgccgaagaagttctggaaataaccatcaacgtgcgcctgttttcaaaatccgaatacgtaagacccgtatcaaggcttccggatgtaagattgcggtatgccctttcaagctggatgccattacatcccatatcccgaagctcattggttatcatatcagcccaataagtgcttacggcataatacaccctcaccttccatccgtacctggcaatatgaaaatcctgcactatcatagcatattctcccacagaataggattaccagaaccgatacagtctgcatagaatcttgtcagaggcattccgtcatacccgtccggatcgtcaatataatcctttacaaacatagccagatgtgtctcgtccgctatcgaacgcttgtagtaatcggcagcagccatatttgccgcatacacacagtcatatccggcatccttttcaagcttgaccccatgcttctttaaaagctcttccacctcctctttggtcatgggtgttatgtttttcacagtccccgattcatccttggctctcatcctcgaaaccgcccagtcacacatcttctttgaaaaatgccatccgtacctcgacagatattccttcatgccggaaggcaggttgtcatacatatcaagtctgtttttcatatatccttatttttgacaaaggggtgtttccaccccccccctatgattaataaaattgtccgtttgcacgtctgcgcctgcgctcacccatgccatcgtaaggatccggatagaaatcaccggttctacgttcaccgatatatccgcctccggaatatccgttcccggctaaatatccctcctcgccacggaatcccatattcccgcgaagctcccgcatcgctttctcgtaaccgtgacgacagccctctctgtaggcttcctccacttcgctgctgcgcatcccgaagttgcgtccgtaatcgtcacgaccttcttccaatatttcccacatattcataatcacttctttttaatggcagtttcagaacctatcccgagctgctctatcaattgcctgttcaatgccatcaaatccgtcatgttcttgctcatctcctgcatctgtgatttcaggttcgagatttccatttcctgctgctgcttcgctgcaaactccggattcaatgtagccaacatatcatcacatcccgatatcacgctcttgtgatactccacgctgttgagtatatccacgctcttttgcttcatggaagccacctcgttgttcatcgcatccctcgaacacgatataacgatattgccgttctgtccgaaatccgcaacatccgctccggcaggaatattctgaaatgtagtattctgtcctccaatgttgattgtcaaatctacaaccatctccattgatggaaactgccctatttgattgggcatcggatatttcggcttgggtgccgatacgctcaccactgaaccgacttccacacggggtttcccatccttgtgaaggatatacagctgattatttgctcttaggttctgaaacatactcattgttttattattatttgacttttgccgcctctgccgctgcggtcactgtaggcttgtagcctccgtttacaagatacacctcattcgtgtatttgttgtaatggatttcataaatgccggctcccgaaatattccctgcggttacaggaatattgccataagccatcagcggacgggtgtctccgtttgtgccgatgacaacaggcaatgtccctgtcgtaccggccgggatgggttcacgcaaatgaatataaaatccacccacatacggacggttccggtaaacatgattaggcaactccaacgtcacattgtctgcaccgacatggattgacagtacaggcaatgtatttgaattgtctctgccgacaggagggaatggcaatcctgtaaaaaatttagaaaacataaattacctcctttctatgtcgtttaaccccaataattgccacatcccgaaccgcaacggttgaatgacgcatcccccatataagcaccgtaagcggctgcacgggcaatatcaggattgaacacctgcaactggggataaggaacgctcaccgtattgggcagcttgcatttgattccttccacatcatcctgcaatgtccgcaatccggcagccaaaggtgcgatttgctgacctactgcattcagaatcgtagcattctggtttctctgtgaaatctctgctgcaagagtcgctttctctgctgtcagagctgcaatcttgtcctgcaatgcctgattctgcatcgcatctaattttgcaaggatggcacttgtgttctgtgaggctccgtcacgcaaggcaatggcattctgattcatcacggtggtcagatggttcatgttttcacaattctgcaatctgccctcatagccttgtctttcaatggctgtctgggtcttgcagcagcaatccgcaatctgtgtcagaatagcctggttcccgctctgaaaagcattgattatctgttgcgtactcataccaatctgatttcccacattcgcaatcaagccttggatattgcagatggctgtctgcaactgttgtgtagaacagttcagcgaagaggcaagttggttgatggcattgccgtttccttggatggcgctcatcagatactcacgccctacatctccgttcagctcggcaggaagtccgttcgctctgttgccgaatccgaatccgttgccgccccaacagaaccacaaaaggataatccagacaaaccacatgccgctgccgccccacatatcctgattgctgcgtccttgattcaacaaagcgagcaaacccgggtcaacacctttgccacccatcaggtttggcaacatcgccatgatgtcaaacttgcttccaccattaccgctgttgccgtcctggttaaatacataagttctttccatatcgattatatttgattacggtcaaaatcaaccgcaaaacaaaattacggatatggaacttcttcaccgattctacttttcacatcgtggcgcaacatctgcacaaacaaatgaagccttcaaaaattacccccccccgtttggttctatatgattgataatgaacgatatagtacgtatactcaatttcgtttcccgcttgattctttcgtagatatatcctcttgacactacggttgcaaggtcgcccaattcattaagaatggaattgtatattctatgcacctcattgtctctcatagaggtactctctcttctctttacgttttctgacaatttagacataactattaatttaaatcaattatctttgctgcgccacaatatgaaacaaaacaaaatccacatgcgttaaaggtatatgcctccaacgtgcatgtggaatgttattttcttatatattgtggcaaatctgtaagaaacgttgggggcttttatttatactctaaagccccgaaaagagtatcatatccgtgtaattcgagaagcaaccacactcatcaacgcaatcgcaatcacgaatgcaaatgctatatagggattggattttttctccttcaccttcctattcaccttcctatccaaactatccctcaccacaacagaatccctcttctcaatctcaacctccgacacccccgaatccttgctttcgtgttcatattccgtcacctctaccgacttcaacgcacccacatctttcaggctcatatccggctcataaaactcaatccttgtcaccttcactctcgtggccgatattctcgttgtgtctatccaactccttttcgcatcctctttaacaaccacagagtccatcctgtgatgctctgcaatattctccttcgtgcttatctttttcgtagcacatccggaaaggaacaccagaataattaatagccatttcatgatttcattgataatttttgcatccgaatttagataccgcccggaaacaaaaaagcggtaagaccacttggaattaccgccaatctccaatataagaatggttaaagtcttatggctttggagtgtggtattctctcaaatctcgttcaagttccttcaaactctctatcttttcaatccttttttgttcagtcttatattctgcaaaaacctcttttgctcttctttctgccaacgctttacttatatggccattcccggataacaaatcctttcgattcattcgaagaatcatatcaagagcttctatccaatcttgctgaaacattttttgatgcgcatgtgcttgtgcctctgcaaaagcaagatattgctcgactatcaatttcagtgcatccaactcatcttgattcaagtaatttttacctacaagaatatcagtcgatttaacaagaccttgcacctgagttgaagtaagccccatttgaggaaggtttgcatttgcgcgatagtatattaattcagcagcagtctgtttgcttacagcccataacaacttattctgtaccttttgaaaaaatcttatcgtcttatcatctttagggtcataatcttcacttaatttataaatatcttttatctgctgataaaatactctttcagataccctgatttctctgattctatctaagagttctcggaaatgacttattccattgcctcgcttcattcgctcatcgtcaagagcaaacccctttaccatatactcttttaggacttttgttgcccagattcggaaagatgtagcacgcttgctgttaacacgatacccaacggctataatcatgtctagattatagaaattagtcggcttggtagaaaattcggaatttccgaattttctcatagtattgctttctgtcaattctccatctgaataaatattattgatatgctcatttatagttgacgttgatttgccaaaaagctctgcaatccctttctgattcaaccaaattgtttcattgaccgcatctacctgaacacggacatcaccattttcagaattgaaaatgacaatttcaccgagattttgaaatttattatctttatccataattaaaaactttaactatggacaaagatacagtttttcggtaattccaatatttcaaagaacacatgatatatttttaattcccccaaaaaataaggaaattaacctacttacaataacgattgtaattattgataaactccacctccgtacccttcccgaatctcgtattatagtgcaccttccaataatgcgcccagccttcaacatcagaaggtatcgcacccttgaatctcagataatgcaccctcgccatgcagattgcaaatctgtcattcatcaccagctcttccgcttccggcatctccttcaatcccgacaccttcaggatctgcctcgtcaactctggtttatatctcagataattcttcgtgatatcccgatatgttgccggctccatctgcataattcccaatgccggaccgcctccgatttgccttctatatttccccaatgcactctcttgcgcacaagtccccatcagcagctcaactgcactatcagagcaaagtcctatctgctccaacgtgtccctaatcaatattcttagaatctctttttccatacttcatttcagttaaatatttagtaataccgcccaacccgaacatactcccgtcagccaatagcagccatgccaacccgtccaagtctgaatctatccgtccatcccacacatcaaccaacaacacaatcccgatgcacacaccaaccaccaccgccgtcatggttgccatcaacattgcaaacgacttggtgcttactcccgtgtcatttgtcagcaactcccgaatcatccttatcatagtaacctcccaataactttttagccagacaaatctctctttccggcaatctctttagacattcatcgtcaggtctcctgcactcgtggaacttcgattccttcaatgctaactctaattctcctttctgtctcaccagctccaagttttcgttttccaaccggtgcatgtgatcgtacagctcatccaccttccgattgatagcgtcatacttctcctgcaaccaatcatactgcttcctgattgcctccagttctgcattatacgcctctgcatcgtttttccttctatcggctttccggttcataaccgcttttatgaactgaaaacctcccaacactcctattgcagcaaagaatgtctctactacgccctttattctatccgtcataatactatttttgttgtacacacaacaaaaatacaacattaagttatagtttcaaacataaagttacatataatacaaggtatattcccggtagattctatacaatctacccatattctacttccttctctttttctgtcattttcacccgccttttcatcgccttccggaggtcattagtaagagtatcatcgagcacctccgagtatatttgcgtagtctttacagacgtgtgaccgagcaatttttgtatcgttgtaatcgacactccatccgccaatagcaacgtagcaaaagtatgccgggacgtgtggaatgtcaccctcttacttattccagcacccttcactatctcctttagcgtcctgttcacgtcagcgttgcatcctatccggttcattcgctccatctctccatacttctcaatcagttctaatgccttgccgccaaatagtaagtaaatcggtatcatctgcttaatcccggtcttttgcgccttgacggacagccatctcttgccgttttgcaatatgatattaccgctcttcaactccttgtaatcgctgaatctcaacccgcaataacagcaaaatagaaagctatccaacaccctctgcctactcttgctcttcaacgtcgcagcctccaactttgccagctcttttttcataagcacccggtgttccgacttttcctttctgattttgaactttctaaaaggatagtcagcgagcgacatatacccctgattgatagcctcattaactagtgtccgcacgttccgcaaatgcttgcctacgctgttcactttcaaccccaacgaccgcaaatacatatcgaaatcggttaaatatcgatagtctatatctgttatctcgaggtcacctttaaattctttcatcctatgtaaggttgccatcatgttctgtttcgtgccttctcttctggtggatgaatcaatcgtattgcgagcaaaattaaagaatgtcacgtccgctgcaatgtgtctttttatcgaagttttcaaatttagcaacgttggcgacacacctcttttccaatatccaatctccaccgcctgcaattccaatatcttctcatacagcatagcattcagcgcattacattgcggatgattcaccacctgtgcagtatctttatcccattctcccggacgcaaatagacattagtggataggtacattttcctcttgtgtagtagtgcctcaatctgcactagagcagttccctgattgttaagggtatttttccggttataaaccaacctgtagcgtattttttctatcatcgttttttgcattaatataacatttttctttgtgagcgtgggagcactgcaagccaaaacaaacaaatatactaaatggataagtaaggaaggttggtatcgattatttagaattaatgatagtggttatggtctattttttacgacaaaggaatggagtgaggctaaaccttcagcatctttagtttccttcagcaaattagatgttaaagtactgctaaatattgatacaacctacttgaatatccacaaagtaagaatagtagaatatgaatcaaaatactatatagatatctttcatagtggaaatgcaaataatgggaatatgtttaccgtcgatgttgtcaggtcttatggctgcacatatatggaactcgagtcagtcagcgatgaatcatttaccttagttaagtcggtgagtttaataggggcataatgcccctacattacgctagaagaattgctttgtatgtaaatggcattgcgatatttgtcagatttttaattacaacacaaccatcctcataagttattggggttttcttattcagggcatcgaatttatgtgtaaatgccgagatgtctccataattgactataaataaatccgtcactccatagtgtttgttgcatataaatatagctccgctacttatctttatttttaaatttccttcttggggcaatgcggcattttttactcctagtgctcccacgcctaaaatttatgtgggagggaaactatcgccatttactctgcacaagaatcacatatctgcgcaacaagacttgaatcttttaactaatgagggaatttatatcgctgcctacgcctcacaattagttaatggtcctggcacggcaaatcggcaaaagatagctgttatctttgtcattccatattctgatactgtattttctcaaatcatgatatgcgggaatactatgtttaccagagaaaaagaacgggaaaaattttctgagtggctagaaatagggaaatcggtaggggtgtaatacctaccgcatcatcgtccagttgcttaatttatgattaaaatcccatcctctaaatgcaagttgcgtaccatcgagagatatttttatttgcatcccgcatctgccgggagtgatacttataaacgtacctccaacaataccgctaccatctccactgctatatccaatcccattttcacatttatctatttcattcccggatatattcccataatttttaaatctaacatctcctgcattctccattatccctcccacgaaattttaagcgtgggagagaaagcgggcatcttaagtagaaaaattgatttgcgcatcaattctaaatctactagtgatttaggaatacgattcggattaatacaagtatggtcagaatatatatcttcagagaaagcgttgttatatttttacagcggaacaaaatgtaatgaaatacaacctgctgttttgataaacaattcccaaggcgcaaaattacgcatattcaaagaaagtgaatcaggcaatatactgattcaaaataattcaattgtattcgcagttgttcacgtagaagttatagtataggggcgttatgcccctaaactactaaactaagctcacctccttaaccaaagtcgaggttgtatcttctattggttctgctttcatgaaagtacagtattcttttctaatgctatctactgtaacgtcatttggaatcgatccttctagttttttataccaaacgtcaaaataatatattgaaccatctttcattactctggctttttgaatgttatcgcctgtattttcagtacgtagcagtactgatattccatagcgattaaaagatacgagagcaggagccggttcgcccgttgcccagcttttgcctaaaaaaaagagaccataactttgcgagaagaatttaaataatcgataccagccttgtgcattaggtctaaatttgtatgcatcggattcccgttgcaatcctcccacgataaaatttcgtgggaggaaaattaggaatacgaatgatatcactatcacacccagatgattctaatgaaattacaataccttgtatttggggatgtattcttttatacaacacatatactggtgaaatgaatatcataagcaaagatcggacttcaatcatctcactgaccggctcaaactcatttataatcaatagtacagtattgttgtcggctccagcctacaataaactagtggtgactttcacaaggaaggaaaatgattctataaaccttgtgattatgggaatttagtagggcacaatgccctacttatttaaagcaatcatatcttaattaatgcaccatcgttaatactatattctgcatttttttcttctgtagcaacgtaacagcaaactttaatcctaccgtacttctttctatttacaaaataacctgttacataaaatatcaccccattaaatactatgacactaaaatgcagcacatcctgattgggtagtagttctaaagttttagaagcaacctctttagcggtgttttcgataccttctccttgggtgttgtatttggcagcaaaaaagccagtcttattttccatattccctcccacgcttagttctcataatatattaatccattccaaatggcctccttcagtgaaacgccctagtattcgttgtccgtcaactgtaatcaacaaatcatgagtgccagaggatattagaacacaactatgatgtccggaaacgggtggattgatagtatctctacttaaatcatttatagtgtaaaatccggcttctatttttttatcgaaatcaatatgtgctggagttccactattattcctttcccatatcttttctcccacaactgctgcaagtctctccggagtcatcattgatagcgcattctgagcgtcaatcccggcaaagtttttcaagtcctcaactaccggcaactggttcattacgtcttttaattctattgtttccatgatttataaatttactattcaacatttaatttttctctgatggcatccgaatatttattcccaagatagtctgattccggagcaaccacagctgccaacaactcactctcgcgctcatccagctcacattcaccatccgacttgtatatcttctctgccagcaatttatatttcaatcctccaaatcgggcatatatcaattctgccaacgactctttcatgtttaacaccattacgcttcctgcaagattcttgacagggatagcttcaaaatttatctttttcatattatcctaaattaatttactctaatcatataccaacctctcgaattttgcccggtatcaagcaatagtgtccccgatggataatcgctagccttatactgctttgtcgtgcctataagagtaggacggaatcgaatgcttccatgaaaggacgcatcattcagcacctctaatttccctcttagtcttgttaagccattttctacttcaatggcaatcggttcattttttggactcccatatcgattttgagcatttacaaccagtgccttcacttcattcaaatatccattacattttgcaatgatttcgagtccgtatacgccggcattgccaccatccgcaacgatgcgagctgcttgtaacatcccggttgatgatgctaatattccggaacctgacgcatagattgccatgcctcgggtggagtaatatgtgccaacgccattggcattcgaaaaattcaccgaccggattccgtcatgttcaagaaccagtccgttcccggataatttcccgttagcatctctgttaacactgccaatccacccttctttggccttaacgctcccctcaatatccacatccttccccttcatctttcctgtcagccagtctatcatcacgttcggtgcaaacttatccttcccatatgcagtctgctctccaaacaaatcatacctcgtcgacggctgcccattctcatcaactccgtgctgcgaaatcgtataattaccgtcaaatacagccgaaccaatcaatgctccctttgccaacagcatttttgccgcaaacaaggtcttctccgttatatgcagccaatatccgtattccaggtcagtagtcaacgtaatgtcccacggagctttactcgtattcccttcaaccctgctgctccattggtaaatgctggtgcttccgttcacgacatgttccagataatctccatttcgaaacgacatatctgccgtccatttgtcaccccggtacatcggttctgcctctcggttacacgtcacattcacagtcctgctttccacgagctttttcttctccatatccgaataggcatccacccgcactgccgttactgtagcatagagcttatcctttgcgggaatgacaaactccgcttccgagcaaagcccgaaatcagttacagcacccgctatctcatgattgagcgataatgcttgcacggatagatagacagacacaggcattatatcaacgccggacacctgctcaaccttaatcttgagtggctccgtctgcacattgtatggatccaccactatcgtgtcggtagacagatgcagacgggtatattctgcatccgctattgctgtcagtgtcaatactccgcttatcatatcatgccgtctaatcttacatgcaatccaaaaccggcccgtttcatatcatcaaaagaaacattgaaggatatatcgggcagcttgccggggaatgttgcagagtctttaccggtcagaataaaatcctttcctgcattgtctatcgacctgtaggtgcattccgctatcttggatgtagaaccgccttctcggctcacggctacaggagtaaccttcaccacattccccttcctcaacactctgccaacggctgctcccgattggtctgtagtgttccattccacgtagtaagtatctgaaaagtccttgatttcccggtatccggacgctacaagagcatctccttgacgtacatcacaacgcaccaacagcgtatcatcgatgtcatctttggttacggtctgttggttggtctggctgctcatcggtacatcaccattggctgtcatcttgttccatgtaaatgaaaatccttgcaggtcattcacaattacactgtcccgaagcagatttgccgtaagcgtcacggttggcttcactttgtcgacacagccgccattgtcatcttcgataatgacgtcatactgattacccgtagattcctgaatgactactggagtggaaacctcgttgaactccatgctctgaccctccatctcaatcgtacccgacactgaaatggaatcattgtcatatccactcaatggcacaaggtttttcacaacctgcaatacggtcatgttgattgtttctgctccaatcggcacgggatgattcagaatccgtttgaaaacaccttcaaaacttaaagtgttgcaaaggttatcctccccgaaagtaagaggaataccgttatatttgaacgtaatagtgttaggtactttcacctctccactcatggcatctcgcaaaatagcagccaccacaggcttctttgcatcgctcaacgcttcaaagtctggaatgaaatttttacctccttttgtgtatctctggataagaggtgtattcaacaccttgatatatccgttaatggttgctccgtccataatggcggtcagcgtgatacctgattgtactttactcattgtttacctcctttctgttcttcttctgccaacggcaataattctatcggtggcagctcatcagcctgttgttcctcttcctttggcggctgttcttctgaaacatcaccgggtacaatctcttgcggtggaacaactccctgctctttctgtttttcaatgagctttttcaactcgtttgccgtggctacaatatctacattctccaacgtgccaaaggctcgaagttcggacaatggcacaatggcacgtccgcccgggattgtctcgtagaatctaccgctacggacttccctcactttttttaaatcaatcagtgcatacatatttctcatatttaaaaatcagacataagtaggagctatcaccgggattccatctactgctaccacgcttgcatcagcatcttctccattcctggtggttacaagactatatccgttgtagagttttacatcagcatacacgctcaccaagtaacccgactgaaatcccttttccttgggaatgaactcaatcgttcttccatagccgagaaccacatctttcgaccccggtttgtcagagcgtccgtaccatacaatctggaatagtccatccttttctttggggatgatgtccttattataggatataatcacctcaaatccggcaagggtgtcaagagaggtgctcatacgcgcccccttggtctgcaccgtatcgacctccaatgtcttaggcattttaacgaatactgaagtgtcagccctgagttcctccgatttcggagctataggtctttctgtatcgaaataggcggctctggcacggaaagccgtattgctgtctatcagccttgcatcgaaagtcagcgtcttgatgaaattgcctgcttcgtccttgcaatcaatccaaatagccaaatcatcatcgctgatggctctccatgctccgttttcaaagacctcccaccaataggcggcattcttgtcatccaccttatccttaccgctgtatagttgtgccgttatagtatgcttccaatacccttcagcatccgggattacttgtagaggattgatagtccacgattccggcttgtctatcttcacggaataattcagagcatcgtaataggcggtgtaaaccttgatgctgttctccaccttcatctccacattcctgcgcttgtcgataaatacggccacagaatggatttccatcggagtgttgggatttacattcttcttgaatttcaatgcgtacttggggaagttttcaaccgttccatcgctgatttcataatcatttcctgtcgtaatccgattagaaccatccgataatggcactccgtcataccattctacatttgtcagtttttgtactccgttctgtattccgtcaggatcctgcacaattatagaaggaatcatcaccaacggaacaagcgtccggtccggctcgtattcctgcgtatctctgttaaaggtctgcacattattgcctcccaatatctcaatctcggaattgagggtaagcgggtcaacatgcgtgaccatcgtttttttgttcgtctttaatcccatatcattatgtttaaataatcattccaaattcatttgtcacaacctcgccatccgggatgtaaatgttacatacaaacttcaccttccttatttcatatccccaacctgtcggcatatccacgttcgtcagtttcagctttcccggattaccatccacataagtaggcttccatccgttatcgctcggcacattcccgctgtctctcagccattctatttcagtaccgggtttacttaatattcgttctgttatatcttcagttccgaatgttacaataatagacaccaccgtatctacacgcccccgaaagaattgccatccctccgaagaatcaaagtccagcatatagcttccattcccctccagtaatgcccatgtctgcgcattccatttcggctcttccttggtcttatccaccagacatccccatttacatccgaatcgccatgcggcatgttgttccaatagagtatatttcgttccgttgggtcgcatggtttctatcgtgatattccgataaggtttatctgattctgccaccgctttgctccacaatcccctgtcaacaacgctcggcacaacatctccgttgtagtcatattggtagatatgttcagccacaatagtttcagccattacacccacggcatcctccggtaatccaatatcctcaatcgcctgaatcctcggaaacttacccacactcagcgcatagttataatcctctaaagcgggttttaccacattctgcaaaaacagcaacctaccttcagtggacgacagataccacgattgggcatcggggttgctttgtccttcttcgggcaagtgtacgtcacccctccggctgatattataccctgccacgggtatatgattctgccctcccggaacttcactgtccggatagagcgatacggtaatgctgtaatcattctgattcgttgtcagcacacgcatatagctggtgtagtaactgtttcctcccgccagcaagtcgttgactatgctgtagaggatatttccctcacggaacggaatcaagtccccgtccctaagtgggtctaataccaatttataggcagtctcatcaatcttctccacatttacaacctttcgggtaggagcaaaaacaaaatcattctccatgccctgaatgcggttgatgataagctccagcaccttcatgctatttcttacttctagccggtcggtctgtatgcgtccgtcttttgtgagaatagtacccttgcctgaaatgaaagaatcgacagccccaagggagcgaagcacctcaccgaaatcaagccccccaaggaatttaattaagctatgagctgtatctggattaacttttgatagaaaatattctgagaataactttataatagaatatatcgatactttctttgtactatctgaaatattatcatctatttcaattgtgtaatattcggatagttcgtatatcaattcaagttctcgaatcatcaatgcattttctatagatgatttagatgattcgctataaaccctaacatctgattcagaacattttcttaatatcttttttttttcatcgactgccctagcataatcgatctcagatattatatccccattataaacaacaggtatgctttcttcaagtattattttataaatatacaatggatagtcattgtgcagcgatgttatttcaacagcacttccatcacttcttgtcattgaaatcccatcaacccaaacagcgctcaaagagaatatgatatttatctttcttgcaacccaattaggaacaccaaaatgagcacctaacgtcaatgtccttttctcaattacgttactcgaaagcggttttaaagtaaacctttgatctctaaaattttcagattcattttcaaaactatcttcttgtggtaaaaatataccatttatgcggaaataaaatgggtctatcccagaaaatataacacctttttcgttccttttgttagtgtattttaataataccgtgtcaggcaaatccatgcatacttcaaaaaaagaagataataatggttcatcatcttttgttcttgcaaaaaacaacgtaaaacatgtatcttggtttatattggaattgtcaatctttaaattatatactttaaatgattcatcactcaatattagagaaccggataattccaaaacgctattatcagactcgtttctaagaaaaggatttattccatcggaatacaatgtgtattgtatctgtattggatctgatggaagaaatttaggtataaaatccacatgctgttgaaaattcaacttccaatcgtctctgaaattaagagaacttatatctgatacttctacttggttcataatgtcatattttacacaaaaatacaacattatgaattaaaacaaaactatatgttacaaataaaacactattcagatttccacaatatccatgtcgtttctgtatctactgcataattctttcttatctcctttatgaatcccctgtattttgtaccattatattcaaattctacaacaccgttttttattatcggcattatgttgccaatatatcctgatgcaaaattatattcaaccggagtaaataatttggatgatatcgtatgatcctgataaggatttattttatcaccggattgaattattacggcggttctattcatatctgtcgatttgaatttaagcacttttgcatttatgcctatcatgctctcattcctcttaactaaataatatggattaaattgccaattaaacatttccaatcctgtgttttcgtcttttatgttaccgctataatcaatcttatagctacctgaatcatgttttagggctacaaaaaatatatcattgtcggaatccttatccgttgttttcttatctgcttcctgacatagcaattcaatacctatagagtcagccctgtatgggctgatgagactcaatttattatcatctcttgttatataccctgtcgtgtattcatatgtcccattagcttcgcatcgcccattgagtgtatcataattctgttttttatatcctattttaactgacgtataagcatgttcaccatccgcttgtataatcaaatctgctacatcatctattcctaatctcatggatgtagaatttttctgataaaacaattctctttttttaaatcttatatgtgtatcggaaatggaatattcatatcctaaaacacgcatccaatcaaaaaaatcattaggagagccatgtatattggcatcgtttatttgacgaatgctttctgatgcaacaatcattatttgaacatcttcatcccaagatatgcttgatgtgtatttatctttaattcccgtcatctcgtcaatatacctctgtagcaatttggcaggagaaaccacgtccacatacatgacattcttgcttttgccaatatattttaaagtgaaatgtttgaaatttttcactttaaaatttatcgaatatggtgtctgttcggttgtcgttatgccaaaacacaatctttcatctttaaaaagtgatacatcaattattgatgcaaaaatataagcatcaaatgttccatttgccctgtcccaaataacaggaatagcccgagacataattgaagttgcattagacaattgtaagtcatttctattatatttatagatagacaattgcaagaatggattcttatctataggggtcaattttgatatcgtaccggatatactcattcctccaaaatctatatttattttcttctcttcattatctctggactctacaaaataactttttattttaggttttactgagtcatgttcaaattcctgcgctctaaattcaacttcctcccccggtatcaactctgaatttgatagcgacattgtaagtgtcaaccatgaagctgtcgctttaaattgaacgtcatttgctatttcatacgatgcattattgacaaaatttatcctttcgtatttccatgctatctcatcttttacttctgataccggtatatcgtattttgtttttccttccgagtttatcaattctattaattcagacttcgaagattcaacagtaactctttcgtcatattctttataggtactgaaatcaatgggcatttcttttatcaggctatattcattactcatttcttctctgcgatatacctctaatataacctcaccgtacaatccttttctcgaaaaaacatctttaatgaaatctttcccttttcctatcagatttattgggaatgatgtttctgtcaatacatcagacagaccatctcttgacattacgatctcaagattttcccattcatcgatatagtctgaaacatctaatgaattacctcccgtttcagttaaaatacattttataagaggcttgtttatattatctttcatctgtttattctttgtatgttgtttaattctcttgcgtattgctcgtttttcattcgtttctgagtcaatttaagaagagttgtcattttgtgattattatctttcattagggagtttaattcctcaaatctcattactttatcttccctttgtggaatcttagggatggcaatatcataatccggcaaaacaacagcatgaggaggtaaatccaccaacgtatcttgtgacggagttttaaagattttgccattggctatcaccaattcagatttaccaccatctcccacaatagctaatcctcccggatggtctcttgttccatctgcatattcaggtatcggggtggctgcaatgattgccgtctgagctgatcctgccgccaaaatccaaggaatctgagcagatgccacagcagcataagctgcagtaaacggattggaaagcaatattgctacctgcgccttgattttcaacacggcagaagctgtttcccttgcaatatcagcaatggccatagccttttcatatatagcttgctttttgcgaatttccttgcgtttgttttctatattttcttcccttgcctctgcctgttcatcgatggctgctttgcgtgcttctgcctgctctttggatatagcaccggattcctctaaattctcaattctttccttttcattttctgaccattcctcatttacttccgattcttcgtccaattcttttagtctattgtcaaacctagcctttaccaaggtatctgccaattcgtaaatggagcggaatgtttcttttattttttctgctttctcctcttctatttcaacaaccttatcttttgtccaggtagctaactcaacctccaactttgccctttcctccatcaatttcgttttttcatcttcggtcagtcctacatggtccaacatttgcgtcaaagattctatttcagcattatatcttaataatgtatatttatctgctatggcatttttctttgcctgataatattcttcatccagcaacattgccccataatcctttgacaaatcccaataagcatcagactcttccaaatccaaagaccttaactttgattcttttatcagattaatattattgatggattttcttactctatctgcttctatgtctatttgaatcttactactctctgcttcaatcttttctatctctcttgctgatttttccctgataagagctatttgatttgttactttcttttcaattacagtcctgttcaatgggtctgaaatgtctagtttatacttgctagcagtctctcttactaacttatcctcctctgcatacgcagaagctaaaacagacttcttcaaagcatcttcatatttatgcaaagcatcaatcctttcttcatagcttgcaacttcactctttactatcagtttattgttttcaattcctcctttcaactttaatgcatccaatttatttcttgcatctaattctctaagatttaacttttcaataaaatctcttagattcttttcttctgactctcgttttgtacgttcttttctcgtttcaatacctaattctttaagccttgtaatttcatcatcaatctgttttaatctctgattcttcaattttatctctttttctgttgattccggcatcaactctgcttctttgcgcaaatccttttgtttttcaatcaaagaatcaactctttgcacagtatcaataccatatatcttttcgatggcaccttgcatattttggatgtctttttgaaaatcattaaaagcttcgtttgcatctttaatatctgaatatacgccttctaatttattttttatgacctcatactctttaattctacctcctgcccctatcgatgttttagtaactttttcattaaattcttcatatatcttcaatgcttgatttcttaattcctcattgtccgatgtaaatcccaccttaaaagctataaatttctctgcgcctacttcatccccaaatttatctttaaacttatctagtactccttccaatgctttatcaattctttttgtgtactcctctatggattttgcgttcgcatcttgtaatcctttttgtatggaatttttaattatgctttgtgtcaataacttatatgcactatccaaatcttccaaatttcttatctcatctttctgaccttttaaataacctccatattggtcaattatcttctttttcgcttcatcatattctttggtccctttggttgttttctttaatgaatctaccataacattcaattgaatggtatctttagctatatggcttccaaaagctttcattatctcgtctgattccatcaaagcctgattaactcccaaaagtccctttatccaaccgaatatttctttatgatacgaagccagtaaagtaattccaacaactaaagctgtttgccaagaaacaatgccgcttaaaacctgcctccacaccggaacagtctttttcccttcatcccttaacgctttgttaatttctttagtcctattcaattcatctactaacattggaaggttgttggatatagcaagaaaaaattgtcctgcgccaattgtcaatgaaggcaattctcttgccacttgctggatgttgtattttagcccactaaatgctgaagaatagttgccaacatttcttccccaaacccccatctttgattcctcattcaaaatctccgcattcaatttgcctatttcctctcttaatctggcatattcctccgaacttttatccatccccctcgctgcagttttcattttgcttagttttgcactcaaagcatccaagctattggcatgagataaaacctcttttgcagcgtttctgttctcctgattattcctccgtgtctgttctctcaatatggctatttcttttgcctgagaactcatcgaatcatttagtttacgctgagccttttctatatcagaaagaactttttgcgttcgtttttctacatcattcttttttgtttctactacattcaatttatttatcaaatctatcaactctttgtagttcgttgctgatttgtgtaattcgttgcttacatctactacaggaacaagcaattcttttaaattgtttttagttatatccaattgagaatcaagttcccttaattgttccaacgcttcctttggaaccaaatcaatattagccgtactcttagacatatttcttcattttcatcatttccacatattccttcatattctttaaatatgacacatattcagcaatagtaatatccgtgcctaccctaaatcctaaccacttgcttatacataccaactgctccgtaaattgatatttagtaactttccgtacaggttcttttgtttccaaatctgcttgcgctttctttaatcggatattccgttcatgaatcttattctttatatcctctataagcttattttcttcaaccttgttattaggtaatttacatctcaatcccaaatcattaagatattcaatcacatatccgacttctcctaacaaaatcaatttaagacaaagggaaaatcctacaatctgacttctgtatatataatattctttcaaatttacagaacgattagacatattgccggataattcataatactcgtttaatattttattccacgcctcttttaattctgacaatgaaggattgccatctattatcaacgcttcaaaatcctgatcacacacaaccctaatatagacactcaatgggcaactatagcagctgtcatatatggtatatgatttctttaattttaccgggtcttcctgctttttcccaacatgtcttcctgtcataatatatcttgccattttcttcatacacaatataatcttctttgtctatttcactctctttgaatgcttgcgtcattattttatcaacgtccgttgtctgcttctttaaacaatcacatgccattattttatttctttttcgagtaatttctttaatgcgggatgtagatgcgttttataaaaatattctttggactccggagacaacccaaatacaagattgttatatttgcgctctatatcatcggaatctctgtatgaagaacctattaaaaaactatcacttctcatatttataaacataccatcctgaaatggtcctgtaacaatcaagtttggagtatttctgtctttatccggatataaagtgggattttcaattcttgctttatgatttgtctctaaatgatatttcatggcagcatacgatttagcagactctgtgcttttaaaatatgggtcatccaaatagcttggagtaaatttaaccccatctacattcctacccaataacatctggtctttatttaaagaaatcaatacatcttgattattctttgcaatcgttgaaactttatccgggacttgtttaatcctacattttagggtctccagtctattaataatctcttttatgctattcatattaaaaaaggtggaacgattctcacgtcccacccgacaaaaaccaaaaaacaataaaaatgaatcaggctactcattttcaacggtctctttaaccatgtcatatatttctgaaaatttctcttcgagaatattgtcattaatgtcagtccatgcaaatgcagcaaccctttctcggacccagatttctttttgcgtgtcaataatcgtattgtcattaacatcaacaaaatatcttcctattcttaccttcattttaaattgttaccaattcattaataccctcaatccccggaatggattcctttaattcagatgcaggcgcaaccctgtacttgcccgtgggttcaattgttaacacacccgtagttggatcataagaaaccgaagtcggattggttcctgaatcatttacaaacatctttgctgtccatttttcgccatattcagatgttatatcttcagctccacactgtgttattacaatcgcagttttctcttttgtgccttttttcaatacaacaccaatcaatccatccggaacgtttacaagcccgatatttattgctgccatattcttctcttcatcttcattatttggggtataataagcataaagagacagattatatgctgtagacccatctgtaggtgccctatgagcatataaggtacattcaaatccggcaaattcataattcgttcctttttttataactgtaccatatacatatccatcattatctactctgaatatgcgcatcttgcgtttattcagcttggcaagctccttgtacatgcaatctccggcgttaatttgatatgcaacatttttcgcatttaaattaacaggcatcggacctccgtaagttccaagatcgggagcattgatatctcctccgtttattgtcatgccgatgatgttctttatcggatatactctattggtcccaaccgtagaaacatccccgcccaattcttcaatgaatgcatctttttcaatagggaaagacgcattcaaagatgttacaatcaaagcagaaaccctaccttcttgctttgaacaactctccattcctgtcaaaggaatggaaattttgcagttgctttcaattgttcctatcatattgctcattttaaaatttcataaatcaattgcgtaacttttttattttcatcttcaatcaatgcgatatcacttttacatagtcgagtattcaaacgcaactttaatccatgtaattctatggcatctatacaatcaccatatttctttatcatatcaccggcactatctccggtggtaaatatttcgtaatatgtgtgaggcgggatgccatagtcaaggataaaataattgcataattgaatctgtcttataaattcctcataaataggtcttaatatatgttcaaaaacctcctcttctcttttttgggtggtccatatgttgttaaccaaacacacaatggcaatattgtaatttatatccacagaatcaccgattttatcttgtcttatcggttggaagtttaatattgacggaaattttacacgtatcccttgtgggtgtttcccaatagacagtaactcattggatatttcattcccagttccgggataatgccataaactgaatttacctttaacaagaaaattattcccgtaagcatattcaaggacattacttaaaaacttatggtttttatttaatgattcccttgtcctaaagacaagactgccaattattttattaggagaaatcatattccaaattcattgataggtctaaaatcatatgtcgggaaatcatcatatttatctttattatcacaaagataccgatgtatccgattgctcatttcaaccattctgttccaaactcttaccaatttcccatacggagatactatgtgtgcatggtcttgcgtgcctttcacctcgccggttggagatgtctgtgattggaaattacgcatgaaaaagaaatatacataatttgcagcaggagatgttttaaagccatttgaaacattaaagatcatatctcttagatcagtccattgattgatgtgttccgaatccggagatgcatttttgatcagcttgtcataattagatttacctatcaatctgattaaataagatttttcatactcttgtatataccaatcaaaatgaatatcacctacaatattcaatatatcagatatgcttccgctatctgaatatttatagccgggaacatacaactccccctgaaaatatgtcatatccaaatacatgctatttcgtcaattttgcaatacctttcttgacaaatttctctgccaaaatacgatgtataacatctttatccccttctttgtgataagcacactttgccgtatataccacttctaccatatcatctttaaataccggtcttgactcttgttcaatctttgtttccatattaaatatttttttcatgttaatcaattggcagggaaatatccccgccaaatttatttatgccgttttcaatgcttctttgattgttgcaaaatttcctttcacaaatgaacctttattattcgtaggaatgtacgacaagaagaacacctcaccaataatagtcattctattgtgaatgaaatcatcattcaccaatccggttctcaatcttggagtctcctcttggatgtaccatgtaccagattctccaataatgaattctccggcggttactttggtagaagtgataaccctcaatcctaacaaagcaaactgtcccccattttggatgtatggcaaaataaatgttccattgtttgcctgtgttaaagccaatttccatttgtccgtaggattaatcaccaatacatccggagcaaaattcaaattttcaagttgtaatacagcagcagcaattgcatcaaattccgttgggttagcaatggatgtgtccaatcctgttgaagtatatgccacagcatttgtcagcaaatccgctgtcaatttctcttcataatctctttccaatttgccgcggaaaagtctctggatatgagaccatagaatatctcgccatttcatcatttcttcagtcacaacgatatatcctgctgccttcttcgctgtaacctggttacgaattaacttcaagtttacctgaggttttaatccattttccgcaacaattgcaaaagacccatcttctgcgccttcttcatcataaacgaaaatctcaggaacttcgttaaccacagttacatcagcaatatcatggatatattgtttcccctgtcttttgacgaacaactccgtactatgctctacagaatctgacaactgtgcatcggttgttgtgctgattgaattggctgtggtatgaatttttccatccgtatgctcacttaccgcctttatgactacatttgctttctgtcccttaaccgcagctaccaaatcatcataacctttttcaaacgcggctctcaatcctgtgcgtctactatttgttaaactttgttccttcaatgctgttaatgcctctccttgctttctaagtgtttcactcatttgttcaaacttttcttttgaaatgccattcaattcactccattctttcaatttcgtgttcattttattaagcatttcctcttctgacatctgcccttttgaaaagttttgaaactgctcattgaaatgctccgccaatgcctttagccctttctgctctttttctgtcaaatccaatccaaccgggattgcaaatacgccggctgtgcatactccggcaacacatcccattccacctgtcaataacaacattaacgtaattgcacccaatgcaatcaacccaaacatcataaatctcatttgaaggcggtttttcgctccagaatatccgccatacttcaattttctaaaaatctgtttcattttaaattttctgcaattttatcaaacatgttactttctaaagtgagtggttgcaatcccggctcggcttctgcatcaagtatagcttgcttgatttggttaaacttatctttatctttagctaaaagttcttttatatagatatttatatcttcctccttgacatctccaacatatctggtttgttcattagacccaagtgtcacaaccgatatttcatacagtttcacttccttgacaataaaagcgtctaattcttcatcgtattccagtttatcccacacataactaaatccaaatgaaaactgatttatatctccgtcttgaagctgtatataagctcttttggcattaggaactgcatcaaaattgcttaattttacagttgcatatgcgccatcttcacgctcttctattttaagaattttccctatagggtcttgcatattatgttgccaaataaatacaatttttctattggtggatgaatcaggacctctatcagatatggatttggcaaaacaaccccttaccagcaaatccctatcactgtcgatattgccgtatgaagcaaattttacctcaatgatatgttcggcatcatctatttctttcatatcttttgcggaaaagaatttaaagcaagaaccactattcatcgctttcttctcctgtagttttattcccttgttcattgttatttgtattttcaggtttatatatttcttcgtccataccaagcctcaatcgccattctgccttacttacaataccattttcatatgcaattttcatggcttggttaatcttatgctctgattcggatttttcattttcagacttttttaactcttctacatctgaaaaatccgtaacaatattacacccatccaattcaaaaaactttgtgaagctctctccatacatttttgcgataggtattattgtctggcgatagtaatatggaatagatacttgcttattgttaaatgtggtgccttgctgattgtttaatagttctgaaggatagccaaatgcttctgcaattctcctaacattggattcaattccctcgaacagcatcaaatcctttacactaaaggacattgattgccaatttaaatcttgatttgctataattatctttctatatccttcaccaatgccgtatcgacctaattcctgatacaatttctctttttcttcatctgacaatggcaaatgtccggaaacatcggatgtcttatttgatagaatcccttgtgcacccctatctttattcaatgaataaatagcctcttctgcctgtatcacattccgtatcgcatttcttaatccggacaatctagattgtccgcgtatgtcagatggtgatattgatatattttgataagaatcttttatatgcaatatattatacgactctatataccttctcttgccatcgatatttaaaaaatatccttttacaatatcatccaatttagattgcgaatataacttacccgtcagctctatatcaacatattgaggattaatgacccataatgcagaagattctgatttatcaaaacctgtaggggttgcagaataaacaaaaacctctccgtacaattgccttgttacgtccatctgcattataaactcggaccacgattgcagcggattaggtcgtttcataagaactttcaatgtaggatatctatctgagacatcattatctttatcgtcaacaatccaccatttacaattagccattgatagtgcattcctgtttataatcgtactcaacgttgaacatttgttataagcatttgttatgccttctatgctatcaagattcaattcgaatccattggaacaagaattaccggtccatacaaaaaaatccaacttacgagcaccggtatcagcagaaaggcctttccctgtgccaaatatattacctatattccttatcttatttaaaaagcccatgagttaaattttcaacaaaaataatcacaatatatgtaataacaaacttttagtttaaaataatacatcagaatcgggacccttttgttaattctgcatacctgatagcatccatgatatggttatatttgtcaatcggagtatctgtaggtaatttatcagcatcaagcatccacttgtattcctgatattcgttccatccgttcgtactcccctccgtcatgtgcataacacaagatttgatttttccaatcccgtattttacagatccctgccctttaattgttgggacaatattaaatttcagttcaggtctatttttccatcctcttctaatttctgcaattcttaaatctcctccacctccggaatcagcaacaatcaaatcttttgacgtaatccccaatgcaaacattctctcggctaaagacaaattatccagtccggtttcgtaaattaattcctttacatacctatacatgttttcgtatttaatctcaactaatgcgttggggtcttcactgtaaccaaaatcaagcgcatacactttaggtaaatcaagagaattatataaatcatcggaaacagggatccagcctgaatatatacgcccctttgcaccttcactaatcaagcctttaacctgattataatagtaatccggatttgatatcctaaacgattcgaatttcgcaattgtagatgtctgtatattggctatgtttctatggtaatcactccagattgatagtatatccgaattacttttaggattcgctttataaaacccttcaattccactttcaaccaaattataatctctccaaatccaatgtcttttaggtggtggattaaaaatacgtataatttgcaccttatccgctcttgtcgtccttaacgacaaatcaagttgatcgaaatcctgttcgcctatttcatcacactcttctatcaatacatgagtagcaccagccaaagacttcatctttgccgtacggctcccatctttacttactccctttgcaaaaatcgtgttccctgtcggcacatacgttatacgcatactgttttcctgaatatgaaaatcttcaatctttaatccaggattctcttctattctgtccttgaaatctctaaataggctatctcgaatgtctgataaaatttgacgcacaaaatatcctctaaaatattcttttttagttatcagatgcaaaaaataatccgtgccaaaatgagatcccccacgaccacgacctccccatatatcaatatagcgacaagaagatgaaaacaccggagcgtatatcttattgaatttaaatctgatttcatccgtcataattttcaaaaattatcttttggtctttcaccgggaaaagttctgatccatcctttccagttatctcctgcttgattggagcatcaaaaccaagcattttactaatactgtcaaggctcttttgcttatcatacatctttacgtttacaaatacatcttcaacttcctctccatctatattccttttagtggttttcgttgaaacagactgtatacatgccttttcgtcatctgtaagattttcgaaatccttcaatttcatccatccgtcacgtatttgacccgcatttgaaaatgctatcttagcatgttcttgaataacccgcaatgcagatatcccggcagtctctgccaacgactcctgcaattgctttattttatcctttatgtgtttcttgtttaaagcttgccgtcctatctctgctgctgttttactactatatccggctcttatcgcagcctgtgtcgcattgtagtctatgcaatattcatagcaaaaacgctcttgcttatctgttaataccgatgccatgattcgttattttatcatttctacaaaaataacacaatgtttaaatataaacaaatccataaaccagatacgataaatcaaacacatttatacatcattcaaaaaaaacagattgtaagcaaaaaaagcaacataacttacaatttataacttcaagtctctgaaaatacgggtttatacaaatcattgtaagtaaaacaccttattttagttataaattgtaagtttgataaattataaaatcatcaacatttaatacctaaaaaaatataatgattgcattataaaaatacgctcaaccacttgttaataatgaatttattatatatctttgtagtaccaaaataaaagaaaggaggtgtaaaaatgaaatgagttataaagagagattgattagccaaatatttagattgctttcactcatcgaaacagaggctaaccaatcaatcatcagacaaatagaggggttattaaatacccttaaagaagaaaaagagtattaacccaagcccccgataagtcgggggcaaaattacaaaatatcatgtatctaggaaaaagaaaaattttaaatattgcagaatacgaagaaaggagaaaaaaatgtattgaatacaaatcggatgcaaccgtaacagcatttagcgaactagaggatattataaacaaatctcagttggcaaagcaatatttcaacaaatcgcaaagttggttttctcagcgtctaaatggctgcaatgtattaaaaaaatctatggcatttaaagaggatgaatttcatttattggcagaatcttttagagatattgccaaacgcctacaagctcatgcagacgaaatagacgcagctaaatttgaataacataccaatttgtaaaaaaataaaggtgcagctattgatgataacaaaatatcaggcagtgtagttattgtttgacagcgtatttatgcaacctctttggacgggactttaaagccccgtccaactaccaacaatcatatatcatctgtaaaatattacattataggttttaaccttatttctaagtcaacaaggcacaccattttcaaacagatattcaggagctatatctgcaccattcgcccaaaatatcgtttcatccaatccgaactgaatgaatttggatttgtctttcagttctttgtatgccggatattccaaaagtggagtgaggtctatcttacgtttttctccattattaaaagtgcatatcatggtataatcaccagtatattctacgtctgtaacttgaagtatcataattgtatctttttatcgtttgatttttgttattggttctcctttctgagcttttccccaaacttccattatttcggtttcatggctatcaataaattcattcacgagtcttatagtacgtgaacttgccctcccctctacaattctatcttttatggtgattgtgaattttccagctccacttctcacatggatatgtggtggattatggtcaaaagcatagatgcatattaatataccttgtattacaaatactgctcccattgttatttcatttttattagcttttccaaatcctcaaatgagttgaacttcctacaaagtgccttttatgtagccattgctgttttttacataataggtttgacaacttccactttcatgccaagtgcatttattattcggtagaatgtggcaacactgggagttatcaatcctttctcaatgcgtgaaatgtaggattttgtcacattgatacgttctgccagttcggattgtgtcatttttgcttctttccttgcatctaggataatctgactggtataaaacgcatacgcttcttcatcaaatgttgctcgctccgatgtgccgattctgccatatttccgttcaagaactgtactgtaattatttatccgatgattgtttgtctccataatatgtctcctttataacattgctgcgacttgcttttctacagctgctttaataaaagagtttatcgatattccggcttgttgggcaagaatggcaattttactatgtgtctcgggggaaatacgtatatttagagagcctgaataacttttgcgtggtgttattcctgcctctttgcaatatgctatataatcatccaccgctcctttaaaatcctctttcaattcagaaacggtttcgccttcatacgaaatcatagtatctttaggcaaatcaaggactttcccaaacagacaattatcttcatcgcttatttcaatgcttccaatgtaacccttgtaagtcaatgttttcatatcaatttgtttttagtcagaaattcaaatacctgcttcattacatacccttttacgatacttccaggatgcggtttgtgtgcaacgtatgagctttcctcttttatgaaaatgacacgtgaaccacttgttttgcctttgttatccatcttatatcctaaaatggcgaacaagcgtacaagctcatcccagttaaaatctttcggctgacttttaaatcgttctatcaacttttcctttgtacccataatcaaaaggtttatgcaaatgtaactattttgtagttacaaaccaattaatttaatgcttttctttgattttttccacaatttcctctagttccgctattgtggtagccctgtaaaaatctcccttgtgatggataagggcggttaactcaccttctcctttcgcctcctcgggagatacaaacagctgccaaacgggtacatttaatgctgatgcaatcttttcaagggttgggtatgatggtgaaactatcatacgtgaaagactctcacgagcgatacctaatttatttgcaagacttgttatcgtaagcccttgtactttaatcacttctttgattctattcataattaattatttttctttctgcaaatatacggcaattatacaaatgtgatatatatgcatcactaaataatgttaaacgcaataacaaatatcacataatattttgcagtgtgatatatataccttacatttgtagtgtcaaaacaaaacaacaactataataacaaataaaacaatatagatatgaaagcagatttagttttaatcatcagtaaagaaaatacattaagcagccaattgactaaaatattcggtgatgattgcaggctgggcgaatttacaaccattggtaaagatgaaaaatatacatatatcaacggatttacaaggtctataacaatagcttatacaacagaagaaaaaataaaagaatttcaaaacacaatcagatattaaaatatggaaattatagataacaaagggggcaataagcccccaaaacatgaaaacgacatgaaaaactattctaacgttaatttaataggtttaccacaatgtggacacttgcaaaccataccatcagatttgggggcaaacaattcatatatttctatattaaaaaaaacggctattttctccaataactgtatagacgtattaccaactgatgcccggcttaatgtgacttccgatactcctaatttttccgctaattccttttgcgtaatgcctctattttggcaaatctcccttattcgtattttcatataaagataatttattttaatgcaaatatatatcaaaatatcattttctgataactatatatgttaaatatacattaaactataattttatcatgattttattttgtgtatattatctttatatgtatatttgtagtacaaaattaaagcaaaacgataataacaacgtcatgaaacagtacacgaaaacacaactaattaacgcagccgttaaaatgggatgcaacgaaacagaggcaaagaaaagaatcaataaaacgtacaactactacataacttatagaagtgaatacagcttaaaaaaggcggcgcaatactgcatgtatatagcaccatgtaactaaccaccccgaacggtttacgctccggttcgattccggagcggggacaaaaaaatcaagcaaatatttaaaattatgaaacattttactaacatcaaatctttagcagagttaaaaaaacagtacagaacattagccataactaaccacccggataaaggcggcaaagttgagataatgcaagaaatcaacagtgagtacgaccaactttataaaatctgggttaatgcgatgccggaacaggctagaccatcagagacagcggaacaaagccgtaaattttacacctctaacggatgggagggtaaaaattacaacagcaatttaacaacgcaagaaattgctaaaagagtaagagattacgcaaaagagaactggcccggatggaaattttcaatccgttgcaaattcgcatcgatgtgtagcgaaattcaaatcgaattaaaaggcggcccgttaaagtctgcaatcgtggacggctcaaaatggggagtacaaacggcgtatcgatttggaggaacaaatgaaagagtaaatccccttgcagaggttgtaatgaaagacgttatacaatatctgcaaacttataactacaacgacagcgatgggatgatagattactttgatacaaatttttacatctttgaaagagttgcgggtaatgaatgggaggaaatctataaaactgcaagaattaaggctaaagaaactacagtacagccagtaaaagtatcagaaattgaaattgtagactacagcgaaaaggctattgcagtctttgggaacacgaaagccatcaaagacgaattaaaggaaataggcggacggttcaacccctcattaaacagagatggtaaaaaatgcgccggttggatattcagcaaggaaaagcgtgaagaagtagaaaaactaatcgcataacagcagggcaaaagccctgcacaaaccaatatatttaaaatcaagttttataaatcacatccgcgccttatatttgcttttatccttgtatataggcgtattttttgttaccatatatttttttgcttcttatttgtaatcaattaattaacaagaaatagaaagagctttaaacattgcaaaacaaccgtttagcatcaacccatatttaataacaaaatcattatgtattaatacttctatatattgatattatagcatttcgctatagatgctattccctgcaatctagaacatttttttcaatgatcattaaatcaacaacagaaaacggattaatgaaagatgttacaatttaaatcaacttggttttttagttcggttttttgaattggttttttagctcggttttttttgaaaattacaaataaaaataaaggcgcaccattaaagtacgcctttacgtgtctaaaagttcctgattttatatcaaagccattgggctgggatattaaaatttaactgatgccatcctatctagaatctcctgatatttagactgaataatagccttttgtttctcggatgctgttattatctttcccttatactttctcattacggattcattcatgcctatttcttttgcaaacttactagcatttataaagggaaacgcttcaaaaaatccactcaaatcatatacgtaatcaatggaatatccgttagcataccaatttggataactaccgtgaatctccttgtaatattctgcctgctcactcaatacaattttaaaatcatcttttgcctctttttctgttaatccaaatccataagctccgttcacatcttcagaatagatagaaatgcctccatcatccgctttttcgataattgccttaatattcttcataaccacataatttgtaatttgtcaattaaaagcacctacaaatgtaggtgctttctctacttctttaacccagcctttttcatcatgctttcaagcgtacctttcggaatctctttagactgatgtctgccgacagggataaagtagtcaaagtcgggatgaacatatttataatgattcgtccctttcttgattgtccagcctgctgactcaatcaatttgtaaaactctgaatacttcataaaatcaaagaacttaattgacattacaaatgtaacgtctttgttactattatccaaattattttcaatatttttccgcaatcaaatcaagaacctttctatttgcatcatcaactttttgaaagttaaatcttgcataccttccggttattgattcatatctatgactaagagctttggcaatggttctctcctctatatcaagattagcagcaaaagttgcccatgtatggcgtgcgtggtataatataagatttggctctcctataaccttacctatcctctttagatattcgttcgttaaggctgttaaagaatgtactgtacttacattccgataaaaattaaacattctatcatcgtctttatatttttcaatcaatgggatcaactcatcaggcaaagccatatctacataagattttgttttgttccggtgatactttgccctatctcctttttttaaatcatatatgtcggatatatttattcctgccaggtaaaaacttatcatgaaaatatctctcgccctcgctacggagggaatgcttgtttcaaaatccctgatagctttaatttgctccaccgacaaaggcatcgtttcagaatctttttgctcctttatcttgtatctcctaaaaggatcgtttatgttggtgacttcattgtcaatcgcagactttattacagcccttatatttctttcatcaatagatattgtatttaccttatttcccgccttctttaagctttgatgaaattcactcaaccatattgtagttatatcatcaaatgtcagacaatcgccatgcctggatataatcttattcaaagtattttcatatatcttttgcgttcttagtgcattcctaccttgaataaactttctgaaataagaaataaatgtttcgctttcattggttatatctatatcaacaatacgattctttaattgaacagccgtcaatgattgtgcgattcgtccaacactattcagcttttcccgaacggaatacagcatattctccaaatccgcatttagaatcttattgtttttcctttttcggttaaaatatactccatctctatcttcgtccatttcagattccaaagcgtataattctgttggaatatctgcatgtccttgcttgtatgaaattctgattacgaccggaaataacccgtctttatttttccttcttgtgtctagttttactgttgctttcatggttcaaaaatttgcacgttttttgcacgttttttcgttcgatttcgttcgatttctaccaatttcagcaaaaacacataggcatatttaacaaaaaaaatgagccacagcatttttgcaataactgtaactcattgattttcttgcggaaagagggggattcgaacccccgaaactctttagaagtttacacgctttccaggcgtgccagttcaaccactcctgcatctttcctcggttgattgctgcaaagataggataaaaagtagaaaatgaaaagtaaaagataaaaattattcccatcttccaaaattagaatggatatccgatggcaatattcaataccaaccctttccaaaatttatcgtttatattataataacctgattttccagtatcataaggtgcatgtattggtattcccaaatcagcacgcacaacaataaaagaaaaatcataacgaacgcccactcccgtacccaaggcaagttctttagccaaaccttttagattaaattttcccccaggccgttgctcctcactacgcaataaccaaacattaccaacatccacaaaacaagcacctttaaaattctcatatattgtaaaacgatattccagatttccttccaatttaatatcacctgtttgatctaaatacgaatattttgttgcaacaggatggtaacttcctgggcctattgaacgcacttgaaaagcacgtatactattagcacctccaatataaaactgttcactatagggcatcacctttgaattgccatacgcataacctatgccccccattactcttattgccaactggttatttctatccattgatttatatcctatcaattccgttgtaagtttcacgaattgtgaatagcggttattcaaaaaagttttaccctctttcaatttatttccaaacaatttttgaaaaccagcgataatattaccagcctgcatgataaacgtttgccagaacaaacgattaggatttctgtaagaaaccgctcgatcatacgtataagtatatgacattgagggtatgaattgattgctaaagctcttggcaacagtcggattgcgcatagtaaccgaatcaaatgcctgagaagtctttagtaaataggtataattcaatttgaaaggcactatagaatgataattcctaaaagaagaattaaaatcataagttgcactaccccaaaacgaaatcatacggaaataattatgacgattcatcaaatctgttcctatctgaaaatgcgtttgttcatgacgatctcgtttagattgcatcaatttgggaaccaataatctcggcacagataaattaacattcaagcctaactcatacgaatttatcaggcctgaattacctgttgcctgcttattaccaccaacttgccattcataagaacccgttaatttgacagaaaaagtctcggctcttttaaacatatttctattcgtaactcccaatgttaaccccggtcccagcaaattattggatttagatgaaatatccatttcaacctcggtttcaataggcaaggcaaactcaccactgatttgcatatccaaagcttgttgagaagtcgtatctgaagctgttatagccatattagcaaatttaaagacacctaattgtacaaactttgcttgtgtcctactttgtcttattgctgaatacaattgtcccggacgcactctgacagctctcattaaaacatttggtttcaaagtcataggaggttcataaataatttttacactatcaatcatcaaagaatcgcattcccctgtcccgtcattaccacttaaaacgacctctacattttgtaacttatagggttttaatgcacttgcaggaacaccttgtttcaatgtaatacgcacatcagctattttattctctgacgttgtatccaccaaaaattcgatataatcaggttgaaaaaaatagtatcccctattacgcagacgatctgagatacgctggcgttcttggttaagcaaattcacatcatagcggtcaccactttttaattctgaaaatcgcatagatggacgcacaatagaatccattgctggactccatccccataactcaatatttccatatttaaaaggttgtggcaattctacccgataactaatcttagcctttttaggattatgttttttaggaatcacttcatacgataattttgcaccataaaagccaaaatctttcatactattttctaccatctttaaacgcaattccggttgaacatctgaaatcaatacaggcttcttagataatttacgatatagccaccactttaaccccttttctttttttatattccagttataaatccacagacctaaaggaaaaggagaacgataataaggagaataaagcggattattcggctttacagataacggctctgatgctgccgaactctgagtactattcaatttcaccttttcaggagtttcaatatccatattctttacaccaacgtaaagaatctcattttcccctaattttcgtgtcgttgcacatgacacgaaaaggaaaaacacccccaaaaacaatgccttcaataaaatttgttccaacctcatatattcagaatcctccattatcatttattcttcattctcatctatatactcaccttctaccccttcatcatcctgcaacaaatcatcttgcacctgtaactgttcatcttcttcccgcctcctcttttcagcccgtctttcttctcgattcttattcttaaacaaatctttaaacttacggaaagtttttcgccaaacaactccggcacctgtctgcactacctccccatccaacacactctcataatttgaatgccggaagacttttgcatataaattacgtttcttagtcaacacatactctatcgagatgtcatccactagattatcctgcaaactacttccctcgccctcattaccatcagttgatattcgcccgccaattttcactcttaccctatcattaaacaactgtcttgaaaattgatacgtaacatctgtcttcatcatattctcttccgtaccatgcgaatcaaacccaacagttaatcctgcctttcgcgtatatttattcaactcattttcaacaaagctataaatagcattattggccatattagtattattagtactagccgcagctgcacctggagccgtatagctattatatatcaacaggttcaatgcttgtctcgtcctttcttctggtgaaaatgtagccaattgattctgaatcaccatatcattaggtgctgacaagtcaaatgttatatctggacgagataatgtattttcaattctaataatagattcaaacactacttgccgagactgatccccctcttccacatcagctttcacttgctcggcagcagaaatattcaacaatggattcatcatatttcctgtccattcaacaaaacttccactccgtatattgaattccttcttaccgacaatgggaacattatattctactgttcctccagtcaaaatatatttaccagataaagtcattccactttcaggattcgttactaacacaaggttacctcctccctgaatattagcatgatttgtaccatcttcagacagttccactccagcccgcacctgatcacctatttctatctgcattttcatagcaaaactactggcatccacctttgtcaaaaatacagcctcttcaacctcaacactatctctaaatgaagtaaaacggacaagatctacacttttatcctctaaagttggatcagaactacgcaatgtatatgtaatatctgtactattcaataaattaatcccccccgtcatatttaaatcagtaaaaggacctgtcaattttgcattcatcccagcataagccttaccataaatcatggaagtcttattttttttcacatttacaacttcaaaattccttgcattcaacgacaaatccatcctcatccgatcaaaaggagtcaaagtcactgcaccattcaagaccgactcactattattaggtgcaataaaacgatacttattaaatctcaacttaccactcttgacaggtattcgagtcgaatccaaacgaaattttgttcctaacatcacaacatcaacatttccctctttaaaagtgatttccccattcaaagttggcttttccattgttcccctcaaacgcatatcccctaacaacacaccacctaaactcataacatcctcaggaataaaagcattaatcatattcaatggtaaagatggaattttcacatccagatttaatcgggattgctctttagaagtattaaacccaccctgtacaaatgcctgatatatagcatcaacactcaattttaaatcaacatcatgctctgtaaactgtttgcctaacaaatattttgtatccaaatttaaagtacctattcgtttcccttcataccctaaatctttcaccttaacattcccatctacacccacctgcttttggaaagtatacatcagcaaattggaattcagttctccactcattgaaggcatcaagggcaacatttttgatagtgcagacaaatcaacacctactatattcgtcagtatcctatctactctttccccttcatccggcaatgattgaatacttatcaacttattttgatatgccatacgtaaattagctcgtaatctgccatgttcccctatatcaactctattgtcgacattcaccatccattgactataagctaaaataggattcacgggaaaaaagctaacagaaacaacagaatcctttaaaactgtatttactcctaactcaaagccaactctatttttctcatccttttgcgtcagttctactcggaaatgttccccttgggcacgccctgtaacccctatattaaacaatccgttccaagtatccgacgaactattcgtctgcatcgaatacatcaagcttttaccggtctgccagacacccacttgcacagaatctaaacttacagttccaacatatggttgcttcacaacaacgccaaaacgcaaaccgctacgacggcgtgacacgataccggcattcaagctcttaaaaccaattccttgcagttgcaaaaaacgagcaatagcattcttatttgctccattgatatccaacgtaaaatagggtaaatctttacttatcaaatccatgtttacatttcgttgctctatttgagactgcacaacctctgcaaccttctccatgtgctcaacaacccccatcaagggagcctctgtttgaaatttcaataataaatctcctgatataatatccaaccacgttccttgagattcactcctcatctttacatctaaatcgcccaaattataacgcttgtaggcattcgaaattttcaaactatccaatttcacattcaacgagtaccgttcatctttaccaacagaagcctccagctttattccggttcctatggcaaacggctcaggcataaaatgcaattgatgcaaatcaatcactcctagtttcccagataatgcaactttataatcacccaaaatagaatcgcctttaaaaactaatcctaaaggagctattttatcttgactcatcaaagagcctctcaatcgagttctgtctaacgagactcccaaagctattcgttcatacgaatggcccttataatcaaacgcccgaatccaagcatatgcttcagcctgtgcagagctccaatcaaacgaatgtcctgtaagacgaatgctacctgttgctaatcccaatgaatcagcgggcaaaaaacgatatatggggaaatgattcaatacaatctcgccatcatacatttttttgacaaaatgataaccaccatcaacagaaaggcagccctcttggcaacacattctcaaagttccctgcaaatcgccttgtttagcatcaacttttgccaataagtccatacccattggaatatccactccggaatcaggtagaatataacgtaaaaatgatacatcaggcagttctcctcgcaaaataagcgagcccttcatcttattcatattctgaaaaccggcgatacttccactaccggtaatcttaaaatgccctggcatgtccaaaatcaactgccccagttgaaaacgattatctgtcaatgataatgaagtattaatcctcatctgccgattccacaattcctgaggtaattccggataaaaatatacaatatccgacataccaatatatccagacacaatcaacgataaagggctgtgacctggtaaattttgaaaatcagcatctgctccggcttcaatttttattttactattagaagtacaaatataaccaccctgtaaagaggtcaataccgtatctaaacgcacatcaccttgcagcgatgttaaagtcacaccatcttgctgtgaagcccaaacatctttcaattttgctctaatacgagtgccctgattaaaaacatcctccaccctgactcctataccatacaacgctatcgttgctttagaagcgccctgctcactcatattaaacacactattatccatatttacactattcaccctcaccgtccaaggctcactgataattgaatcatttgtaacggtctccggttcttgcaatgtatccccactagccattaccaaccgacaccaggcccccgatacagccaaagaatctacatccacaatctgagtaccaagagccaagtcaaatccgctcactttgccttgcgcaagtcccgcatccaaggaaggtatcgcatccatactcattcgataagatatccggtccaaaaccaactgctcgacagatatcaaccagtccactggagttgattgtgttgtgtcagtttctttacttaccccgacatccatagagacgtcaccaccagccaatcggattgcatccacatttacccatctgttctttaaatctattttcctggccttcaaactcaatgtatccgtcaacaccttcaaattcattcccgtcgtatcatctgacattccaaaattcacatggcacaacctcaactcccgtacgctcaaacactgttgcaatatatcttcaactcccacctccaagtgcaaatttcccactgcagccaatgtatctgtcggtgtttctccgacatagacatcttgcaaggtcaaatttaaaggatagcctaaacggaattgcccgacactgacaaccattccatagttatctgcaacataaccgaccgctttatcttttatataattctgaacaaaaggaagatataacataaaaacaattaaaaagggtaacaatataattacccctatactccataacaaatatctcaaaatcttcctcatcataatacacattcccttaaatcaggccatcatttcatttatcttcatcaaagcctcaggagtccctaaatccataaaaaaatctccataacgaaacattcggacgttatgcttttttgcctgagccaaatactcatctattattgagaaacgtcctctcccctctatattcttcataaattcactgctgacaatatgaattccacaaaagctataactctgtgctgtataaaattcatcatccacgattttttgttctccggttaaactattttcccaacccttcagtaatccctcgtcattaaatcgcaaaccacgcccaggcaccgactccctcaccaccaatgttgcataatgcccaacatgtgcagctatcaacgtctgcaaattcaaacgagaataaatatccacattatgtatcaaaacatcctctcccggagtaaacaacgacctagcttttaaaagcccaccccctgtatccaacaactcgtcgctttcatccgatacatagacatgctgctccagataccctttatctttcagaaaatccttgatcatatcggcaaaatgatgaacattcaccacaatacgcttcaccccggctgctttcatttttaaaatcacatgctccaatagaggctttccacccacttctaccatagccttcggacgttcattcgtcaaaggtcgtaaccttgttcctaagcctgcggcaaaaatcattccttccatactacactttcaccattttattctttatcgcatacattaccaaagcagccgtattgcgacaaccggtcttgcttaataaattggcacgatgtttatcaacagtccttttactgataaacaatttatctgctatttcctgattagacaatcccaaacatacgtgatataaaatttccatttctcgctcagaaatttcattatcacatacttccatttcctctcgccccccatccctcatattatttaagatattcatcaatagttcttctgagaaataattctccccggatgccacagctcgaatagcggcaatcaccttttctattcccgaattcttcaaaacaaatcctttcacaccagcatctaccatcttataataatattgttcttcaccatacatagacaatacaatcacttttaaatccggcttgatacgcaatgccctttctgttgcttcaattccattcatctcgggcatttctatatccatcaacaccacatcacaatctacaaaagacagattttctaaaaattcccgtccattggaggcctcataaatatggtgaacaaactcctgggtagacaacaacaatttcaaaccttctctgaacaatttgtgatcatcaacaatatatattttcaatttattaccattcatagattgtccacttttgtactacaaaaatacgaataaagttacaaacatcaaaccctgacataagcattagctcgcatgcctcgaccttgctcactgactatttctatatttccattgacagattgcaagcgatagcgcatattatttaaccccattcctccacgttgctctgcagcatccaattcaaatccaactccattgtctgtatattccaaaaaaagttggtgatcgtccaattgcaaatcaatcaaaattgcagaagcaccagcatgcttcaaagtattatttatcaattcacataccactcgatacatcaccacctccgtattatatgaaaaacgttcatttgccaagttagttgtaaaacagaccttaaatccatcagcttgccccatccgctttataaaagcttctattgcatctttcagaccaaaattattcaatatatgcggactgatattagccgatatatcccgaacaccggcaatcgcttcatcaacagcctgacgtagattctgttttatcttttcactagtctccgccgaactctttccatccagtccagacaccaacatttttatcacactcaacaagggacccaatccatcatgcaattcctttgcaaaacgttgtctctcctgctcttcagtacgaataactgccgccaaaacccgtttctccgtttctcttctcaattcatccaaacgccgcataaactggaatattttcctgatataaaacacccctaccaacaacaccaaagaaataataaatgccaaccagcgctgcacaattgacatctgatcttccatctccggataaatcgtaggccacaattcaaacacccttgaaactgccatcaaaagaaaacctatcgaaatcaatatccatgatgaattaaatttagtccgcttaaacaaactgatagcaatagccgctgctgcaacctgcaacactaaagatacatactccaatacaattgacaccataactaaaaatattattaaaaaggatatccgattgcaatattccatacaggcttccggaaaccactatttttatcaaataaaacaaatcgttgtccttcctgttgcgcagggtcatgtaatttaaatccccaatcaaaacgcagaagaagaaaagtcacattaatacgcataccggctcccactcccactgctatttgcttataaaaatccgatccaagctgagtagccggacgattctcataattttttaagttccatacatttccggcatctgcaaaaagtgcaccttccaaaagccaaaataatttaaaacgatattccaaattcgcttccaatttaaaatccccgacactattgggatagctatcttcggcccgataaccaccaggtcccaatgtccgcgaatgccatgctcggatatcatttgctccaccgcaataataagcttcttcaaacggtatcgccttcatatttccatatggaaatccacatcctaaaaacaaacgatatacaagtgtattcgcccgatttataaaatgattaaagcgatattctccatccatttttataaactgagcataacgcactcccaaagctttataaaaacgctctccatctgattccgaacgactttttccaaacaacttattaacacccaacaaaaaatttccagatgtttctatatttcctctaaaataatttgaactttccgtactattaactgctcgatccgtgtaaactgctaaaaaattagcagacaatatcatgtgatcagtataagcactctttacatattgatttttcaatccatcaataaaagccctatccaccttaggcatcattacataattcaaatcaagcaaatcaagaccataactccacttattgttcgcatgcttccaaagataaccaaatttagcactagccacctttcgtctataaaactgggtccgttcctggctataagacaaagaaatagacgttttaggagcataatcccttcggaatcccgccaaacgaaataacggcaaccagaattgcggagtcactaatcttaattcggcacccacttctgtagtactgaatatttcattttctttcaatttctcttttctcaacgctccccacatactcactctcagattctcacctccatgaaaaatatttttatgattatatgaaaaattcccccccactcctatatttccggaattgttcgttccttccaaaaacacattatatgcctgcctcttcattggtgtcaactgaatttcacaatccaaatataaatgcccctgagcgtcaaccctttcatgaaaaagaatattgataaacttaaatagattcaacgcctgtaaacgtgcataagaacttaccactttctgaatatcatacaattccccacgttcaaactgaatactctccaatattacctgaggttttattttcaagttattattatacaacacctcatagccatcatatatcttcttggcatacacctctgttgtagggactcccgccaataccggatcataatccatattcacccggatagaacctataacataagttttataggcattactatcaggtaaactattgactatccccatcgacaaatttgctttaccaggggcaacagtaaccgtatctgcataatattgaataagatgctttgaaaaattgtaatatccttttcctcttaataattctgtcacccgctctcgctcactctccaatacatctacatccatcggcatgtcacgtttcaataaagagcaaacagtatctctcatcacaatttgatacaagggagtatttattggtaatatctcgttagcaatccccgaatcagcccggaatgtcaattcaccgacacgagttacctctcccatttttatatgatactccacattgaccttctgcttataaaacagcacagaatccgtaacctccgcattataatatcctttattattcaaaaatagcttcaattgctcgacactccgttccgttaaaaaagcatcatacacaatcggttcctcaccaattttacgcaaccacttattaaatttcctttcaccattccgaccactaagattatatattcctaaatgaaatcgagccacccctaaaattctagtattaggtttctgcctgactgttttctttagttcagagatactcacatccttattgtctgtcacaatcttaacacgattcaacaaatactcattctctctcaaatacttagtcggagcacaagaaaagaagaatactaaaaggcaacaaagcaatataatcttatatggaatatctttcttcaattatcaaaaaatgttactatttttgcacataatcattatgcctatgttaagcaaacaagtaacaaaaataatccaaaaccttgaaaaaaagaaattcagggaaaaatataatctcttcaaaattgaaggaacaaaactagttaaagaactgcttcattctcacttcaaaattcggcacatcatcgctttcgccgaatggatagaacaaaatcagtctcttctttccaatacaagtgtattggaagttacccctcaggaaatgaatgccatttccaatttccaatctctaccagaagtcatagcattggcagaaatacctgttcatctatattctaaagacaaggttgaatccaccttgtctcttgccctcaacggaattcaagatccgggtaatttaggcactattctccgcgtagccgactggttcggaattcgtcacatcttgtgcgaccacgactgcgccagtgcatacaatcccaagtgtgtacaggcaagtatgggagccatattcagagttcatccctattacctggaactgccggaaaccattcaagagttaaaatcctcaaactatcctatttttggcacatttttagatggtaaaaatatttatacaacaacattaaaagatagaggcctcattattatgggaaatgaaggcaaaggtattgcccctaatattgaagcactaactgatacaaaactgaccattcccagttttgctgccacagacgaaggttctgaatccattaacgttggagttgccacaggtatcatattatcagaatttaagagaaggatttactagacataaatatagttaaacataaaagacacgacatgaaaaaactagtactattattacttgtatgctttatcggctatgcagcaaaagcagaaatgcctatcaacatcggtatccacggcggaacatccagcaaccgtatcaatttccgcgacctcaccaacatacacggctcccgtgcttcacagggctatatgataggagcctttatgcgcatcaatctgggtggcttatacttagagccgtcactcaattttgcccagaaaaaaagtattgcagaaggcaacagaacatctgtagccgatgttaatcgcccgacctataccatcaagaacaatacgtttcaaattccgatcatgttaggatttcaattaattgacctttctattgccaaaatccgcttgtttctcggaccacagttctctgccggcaaattaaaaaatctgagaaatctaagcaatgaaatagaaccgaacaaatcctattggagtgggaaagtaggtgtcggcatcgatgtatggaaactgacttttgatgttgactacgaaaagggattacaaaagatggctcatgaattaaaagctccacgctcttacaactttaccttaggattaaaaatcatttaattcattttcccctgatactcaaacgagggcaaccccaaatggtaagttgccctcgtttttttatatcactcgccatattgaaactgtcagttattttctttatttttgtagcaaacaacataaaaggttatgaacagcgacaataaaaatcaggtaatctgctttgattgggcgatgaaacgccttttaaggaacaaggcaaatttcagcgtacttgaaggactgctgacaacattattgggagaaaagattgtcataaaaaaattacttgaaagcgaaagcaatcaggatgatgaatttgataaatacaaccgtgtagacatattggcggaaaactccaacaatgaacttctactgattgaagtgcagaacaacaacgaatacgcctacttccaatgtatgctgttcggaacatccaaactcgtcacggaatacatcaatagaggagacagctacgacaacatacgcaaagtgtatagtatcaacattgtctatttctcgctgggacatggtaaagatttcgtatatcatggcaaaacagaattcagaggcattcatactcatgacatattggaactcaccccctttcaaaaacagaaattcaaagtggatgctgtaagtcgattattccctgaatattatattctaaaagtaaatgacttcaatcagatggctaaaagtcctttggaagaatggatatattatctgaacaccggagaaatcccctcaactgcaacagctcccggtctggaagaagctcgtcaacgactgaaactggacaacatgacaaaagacgaactatcagcatattacagacacttggacaacatcgtcattctccgagacaatatctacaccgagcgggctgaaggaagagccgaaggaaaagccgaaggagaaaaaataaaagccgaacaagttgcacaatatctcaaggcggcaggttcatccgtcgaattaatcataggggcaaccgggctgactcaagaagaaatcgaaaatctgtaatagcataccccctattattagaactgatgagatttaaatctcatcagttcaattggaaatactctagaatctgttctagtgtagcatctttcaaaatcacgtttttatccttatccaacagatagagcgtcgggcttgctactaggtcgtatacctcttctttcgtgattacctgaccggcatcatacccactaatccattctttgggatgccaagcagcccgccacatcaccaaatcagcatccggatacacagacagaatagccagccgtcccccggcaatccaatcataaaattgtccaaccgatgccaagcaatcatgcacccgccgacactcatcacaatcaggagcattaaaaaaaagaatagtaaattccgccttcacctgcgagagccgtccattcctaccatcagccagcgtatatacaaaatcctcagcctttctgccgggacggtttttccttgccaaccgcaacaactgtgccggtctctctttctcttccgacgtgagagccttagatacctgaatatactccaataccggaatataaagttcgctgttccgcaaaggcgaattaggatcgtacagatacttctcgtacaatgtcagaaaatagtccagcatctccctgcctcctttttctgcacttgccaacatctgtttcacagccttattcctttgcggagcataaggcaatatctctataaaatttgccaacgcctgctctgtcagttccggctgcctcatcatttctgcatcctcaaaccggaaatactgccaataattcaatgccaaaaaatccgctcttgcagccggatcggtcaacaccatcggcacttccggcaaccggaatttttcctgcccttcgacagcagataccaacagcatcccgcacaacagtatcaagacatatttcataatcctacaattttactccacggcaggtaccaataccaaatcaggattacccatcaagatcgccagactcagcacggaacaatgatataccttgccctcatgggtataatgtaactctatctcatccgcatcccagttgaatcgatattctttacgcaaacgcaattcatatttcccatcagcagtaatcgtcattgaaccgatacggctgccatccagtttacgctcaaaagacacgaaagaccttactggtatcggttgatttacaccattctcctcatattggattgtgccggaaattacctgattgacaatccggaaagtcttgtcaaaaaataccaccatctctttatccgatgaaatcaccacatcacctccactcacggcagtagcggtcttaaaaggtaatgtcttatgctctccactctgatttacaccggaggtcgcatccttatgcaccacctcatctgttccataactccgttctttctcacgatcggcatccaccatatagataaatcgtccttccacatccgggtcttttttcagtttaccgtctgtcagcttacactctgccagtctctcctcgtcaatctccaacattggtgcatcaatgtagatttcaaaactattgccgaatggatccacggatttcttgtcagtcccctgaaaactggtcacgtcaaattcaatatccacccgctgattcggaccgtattccattttcacctcatcaacagactccgctgttgttcctgaagcatcggttcccgaatcattgatgcgtgcagcaaaccgaaatggattgtagtttgccaactcaaaggtcatggagcgatacgtattcccctgataattatcgctattgcctggctggttcgatgcaatacggacaacctcctcgctgtgcggtctgtttgtctgcagatagattttatactcgcttttaccgggctcatcaggcttgaactgatacacccgtccgccagagtcccataaatcttcccttacaggctcaaaagtacactctttttgtattcccaaagaattcacttcttcatccgtataatggtccagattttgcgaataaagcaaaaatttatcgtacattcctgccataaaaggcttgtcttgctcctttaattctatggtaaattccacccgggcattctttttctgcggcaccagacggtaataaaccatttcatcctcagccagaccgacctgccctccgctataggattccaaacctgctacagaaatggcacgattaactgccgtaaaagtaaaagtcttctccagcgactcaaagaaaggagcttcgattttcacgacatcatgagcatcttccgactgattaagactgatcttgaaatagatacgctgcactcccggagcctctacccgatgtttgtatttgtatccccattcattaggctccccgaaatcggggtctgtatccgtaattacaggcagatccattcccgatgccgaccgcacatccagttcacccactccaatcagtacatccatcggaaacagttcctccggacagctttccggcaccgtaaacatcagggtcacatgctgtcccgcctgtcccatcacctcggtcgacacccacgtcggttcaaatctttgggtctttaccatcaccacctttatcttccgttgcaaacgacctttcttcaccagcagggtaccttcgcgtttttcagcttcacccatgggaaggagctgaatcacgatactgctgttaccctcggtactgaacaaattgccgggattttgtcctgccacgttgttgccgtccaaccaactgacctccggtttgtcctcctctatcaaaggatttccgtccagacgctccagcttataatacaaggtataggcagggtctgtgaagtctcctccaatcaccactccggtcttttctacagacagtctgtatgtattatcctgcaccgaagccacctcatcgctgaccgacacccacacattattggttgccgcagccttcactgcttccgcaaatgtattctgaccataagaaagtttcccgacaatattcagtcgataggaataattcctccgaatcatcaattgttctccgttttcatccaccagcatcacccggtaatacttctcctcaccggaacccggttcatatccccggataatcacacttacagggttttcctgcgaattttcgcactcaaagacatattccgactcactggtcgacacatccatgatatcgctcagccgggcatcattgacaggcagtgtgacatacgctctgtctccgggccagtcaaacgacttcttttccgcatcataaggggctaccgtaccgaaggcaggagtgttatacgtcacgaaacccgttacctccagccacccattaccgataggattattaattgtcacctctgcctggttgcgcaccaaagtaatcgttttccccgacaactccttgtctatagtttgatcattattcgtagaggcgaatcttccccaatagatcatcttgccggacgaaccctccaacgttgacatggctgcggcttccggtttattcctgaaattatcttccggaaaattggacatattctggttcgccacaaaatgaatgatacgggtattgtggggaacagcggctttcagtttgccactgacagaaaagtcaccgggctccttttccaaatccgcttttgcagtcgaaatgaacagtccgtaagcatcgaaacagaaaagcgtcatattctggatgccgcctccgtccgggtctacgctgcgggtctgcacttctgtcattccgggaatttccacaccgaaacggattgcaacatacccttccggcactgtctcttccctctccatatccacctgctcgttctgacaagccgacaacaccggcaacaacatcaaaacgaccattactgtttgcaacacttgttttatcataactgtctctattagttcctttgtttattgactttggcctttcctgacacataggcatcccggatgcaacgtacggaagtcccgctcgtgttatttttggaatttaataccggtccgctggcagacatataatattgcgcattcagcagataatcgatggcatctgcctgttggcttgaagttccctgaaattttatgataatatttatttcagcttcggtaggcaggcgccagtcgtccaatacgattttttctccggttttcgggtccttatacacctccacatattgcttgcagtgctctctgaacacctgtaattttttatcatctgtattaacatatgacagattacccgcatctgtattcaagaatcccaaacgggaagcaatcataaacgaaggcgacaccaatttggcattgtcggctccggcatccgtaaaaccctcgctgttcatacggggtcttcccacagtatattcatccgaagatgaggtcaactgaatatggtacattctggcattaccatcgctttgagcacttttctcctgcagtcgtccactcctattatagtaataataagaaatatccgacattccgcttgctttgggttcatccgccaccttcgaacgccagaatccgtcagaagcagtattgtactcatatcgacctgcccatacatattctggtttcaaccaagaaccgatgttctcaatctccaggctcacccctgcgatccgatcccctttgtattcatacgtcgtcggttggctgtcatttgttttaaagtcatccctgtacgaataccagctttggatgttggtgatatattccagcggatattgcgccacaatcacttcgtgcgaaagattgtctgtcctgttccacaccgtcagcttgatatagcggatggtattgtttgtcgggaccggactgtgcagtttgatatttccggtcaaatcgcctgtcggcactgctttcacgccgtgattccggacggtctgccgctgtccgaacttgtctatataatacacttcgtccacatccacggtaacgtctgccgacgaagcgaaatgaagagttgtattgtcatccgcaatattaatcatctccacagagtccgtattgacggtcagatatttcggacggtcggtctctccgcctacatttatcactttctcggtccagggacgtacatcataagagatattatccaacgtcaacggtttgttcatattggctgcccccggagcattcactgtcaccgtcacgccataataggtgttcctgtccagacgtttggcttcactcaatggaattttatagtacgaattcggatactctttgctttcatcgtttttctccctcaaagggatattcaccaccaggcaagtctccctgtccaaaggtttgtcctcccaaaaattactataggaataggcagtaaccgttatcgtattgtctgtcgcccaattgaaatagctgccggctgtcaggtccggggttcttaattctgcatccgtgacctccacctctccaagcaacggcgtatcgtaagccatgttcatcagatagtaaccttcagtccccaaattcctatcaaattccaccttctccccctgctttatcgtgactacgatttttgcagcggccctccgcaacacgacgttcagctccgtattgttggcttccactccatcagtcaaagggattgccgtcggcgactgcggctcggttccccccttcacataggcacacccgtccatcagaaaacagtcgggggcttcctgtatatccggattgccggtcatgtgaatgcgctggtccttctgcttcaagatctttatctccgccaacgtcttatctttaaaaacaccggcatccagcgtactatttgccagtagatacacaaaatacttcttgtcctttgaaaaatcgctccgtttgactgccaggattattttcccgtcaccgtccccgttcactgccacccgttcgttgtgtacatacttaccacctgtttcctcaaaaaacaacacatccagatgccgtatacgggtttccacttcattttgtatggtggaggcacgactcaccgtttcctttccagaagtgatgttcaatatcaccttgtccgttgcgttgccatcctctattttcggaatggcttcctcccggctgcaagccacccacaacagtgctgccacagcgtaaattatgccgaatacaatccgtttcatactgtcaactatttactttctacctgttctatcaaaatcctgtccgttttgactccgctgtccggccatcctgtattaccgcccgaaccgccgtttatcaacaaatactgcgcttcctgcgcataaacaggcgtaaaggtgattcccagattaaccgtcttgcccacattttccggcttcagtgccaccactttaatcatataccaatccggagccgctatccactccgccggatcggtcagccgccgcctgcccgtattgtcgtatacccttacttcaaaatcggtttccggagcgtccaataccggtgtccatttctgccctgcaggagccgacatctgaaacattgccacaaaagcccccgcctccggattatcggcagaataccgcacctgcgggtcggtacgctccccgaaatcctgtgcttccagcggattggaagatgtgggatattcgaatgtcagtcctccctcccaattgtctgccctcgtccagtcggctaccgtatactccacggttatgccgccgctgttgcgcatcctgcaacaaaccgcataatatttattccggtctatcggcggcagatacaccgtcccggtcttgtccaccccgccaatccggtagcttatctccaatacgttcccctctccgctcccctccacatcccaagatgcggagccgtatgcgttttcaaacagataaaaaggggcttgcagcacatcggtatagttagcggggtcttccggctttccgtcctgagggtattctttacatacattcccattcaccgacaaccccatatcgctgcctgtggcagggattttttccagcgttcccggttcttgcggagccagataattgagagccctcaaaccggaacctttcaatctcagccccgtcaccgacaagtcgccggtctcgcctgcagccttggctgcaaacacgcccaacttcgccaccgaacgctgcaattcgaaatccaccttctggctcaacagcgtatgtccttcatgccccggcatatccgcgccgctgctcgcggcatccgttgccacatccaattccactcttttatgaacgaacatcagcaatcctttctcctgattcagactggtgaaagtaaaccgcttcaactctccttctgtcgttttatcattcaggtttgtactgcttccggcagtcaccatcgtcccctcgttcgccaccacatagaaatccactgtctgtttcgtcagcgaaaacatcttcaaatccatcagaaaacgctccggcgaaaccaccggttcagccgtataataatgtcctgccggttcgcctccgacaaaggcatacacccgcagcgtattgatcgccgcctctgcaccggtaggcgtttcctcgccggcacgggagccgacactcatcagcacgctgacattccgttcgccaagagaaggtccgtcatccttatggcagcctgccggaaggacggcgcaacagacagccacccataccgtcaaccacatattccgcatctttcgcataactattcagatttaaaattccggtttaacatattccacataccaatcgggcaatgtaatctcaacacccaccgccttgaactcgaaccgcagtggtatcaacacctcctgcttcgaacagtccacctcggggtgggctttcagaaaatcggcaaggttcacctctgccagcacgctaccgtccggtgcacgcaagatgatgtccactgccgcatggtccgaatggcgcattatatttgtgcgggactgcaacatcccgttcctatattccgtatccaaaatataatccgtcggctcgccgcctgcacggttttcaaagtctgtgtaaggcaatacaccgctccactctatcatcgggtaacggcttccctccactattcctgccacttccaccaccactttataatgtgagctggcaaaatccagcgtcttagtcacatcctcccctgtcactgtcagtgtcagggatgaataatacagggaatcattcccccgtatggtcctgttttcaaaatattccttggcggcatagtgcatctgcgaataatccgcaccgctcaaatcattggtccgggaatttcccgtattaccgaaacaaatcacccggtagtcgcccaatggcaaatccggcaacaccacccttctttccttcaactcccgctccgacacctccaatgtagttgtcagattcttgttttcatcaaaaacatacagaaccgcattccggatcttctcgttgaaaatctccgacgttccgtcccccttatagctcatcaacagggtgatatcactgaaacaaccgtccaaatcctcctttatgcaaccacccagccccactatcaccaacaccatgaacaagattttatttaccgttttcatatccgtatgtttttctacaacatcatttgttttgaaagatgggtagccggaccaccccggctaccatcgtattaagtccaattaaaattgaggagtaacaacttccactacccaatcagcaacagtcacagtcacctcaacacacttagtcggctgctccaaatcgttatcgttgaattcaaaagagagtcggtaaacctttccggcttccaatttatttacaggagaaccctcttttagcaaacctcttgctacaatatggagaggaacattatctcctccggcagccggaactccctgcatctgcaacaggatatacgggatagtggcaccggcagctacgtgataaacataagcatctttaccttcacccaaaatgtcagcagcggtcttctcttcggtaggcatcaattcaacacctgcaaaatcatcattagtccaacccgatgtcagactttcgaaaaagttttgtgaattgccggttgccggtacatcatagaaagaaagttctccgctgtatgtaccatccaattgtacggcaggataatagttgtcgatagctattttattcaataaaattttgctgtattttgcatctgtctgaggatcaacctttgcatatttgaaaccagtcacctcgatacgtgcaatcaacggcttaacattaatagctgctgtataaacatttgtatgctgttcatcatcagcacttccttttttaacaaaatttccggtgccatacaatgtcaggtctttttcatcctgttcttcactcatctggcataccaaagctttcagagctgccaaagtagaacagccatccaattgttttttcaatgcaccttccactccacccacattaccgataacgattgcctgattggctgctccgttcacaaagtggaatgttttgctcaaagtagttgcattataatatttctctgcattgtctttctttccttccggagtcaaatcataaccaccatacaggtttgttccatcggtaaacactacataatagtcattcaaagtcaccttcttgtttccctctggaatttgcgtaccggtacccttgctctgcggcaaaatatttgccaatgaaatcgttacactcttcgattcttcgtctttgaacaaatcatcgccatcgttgttacaagctgtcaacccaaatcccagggctgccagcaaaaccaaacttcttagtttcataatcttctgatttaaagaataattaataaaattgtctaacactatttatctacatcatttcaactgtttcaaattaccttccgcttccacatgtcccgcctgcaaagccttttcaaaccaaccgatggcctcatcctcatcctccagcatcatgtagcacaccccgatggaattgaatgtacagtcgtccttgcggtattcgagcagcatctccaaagcctcgctgtatttgccggcacggatcaacccgttggcggcattcacggcatctgcagccttgtcacccaacacatcatagtacaccgacacatagcatgcattacgcaatcccggataaaactccttcagcatatatcggtaaggctttccccctgccagccgtttcaaggcattcttcctgccgcctgccacctgctcgtcgtcgataatcgccaacacctcatcacggtattccatatccgaagcctccaccagcttgcgcagaccgtcccagttctccactccgttcaccagcaggaaattctcctcacgcaactccggcaactccttcataagatacacctgtaacgctttcgcacgtccctctcccaattgggtattgaacttcaaaccgccttccggcgaagcgaatcccgtaatctcaatgccctgcagcgtcagttgctccaagtcaccgattttgcggacacttgccacaatttcgtccaatatcgccttgttatcatagcggtcggggtatagtatcaacttggacaccgggaaaaacacccgcatctcctgtgagaaccgccaccgttttttggcttccaccacctcaaaatgccggggctcgggctccacctcctctacggcaggaaccggagccacatacaccggtacgttatctgccagcgtctggctcccgccacaataaacacacccgcacccctcatagtggtatgccacacccaaagaggcatgtttcatccaacggctgtatgtctcctttgccacatactccagcgtatccttccgccacatcgcctcgcctgccgacagtccccaattgcggttgccctccaacgccttcacctgacgatcatgcttataatacaactttccataaatacgggcaggctccagccacaacgtatcagctccttcactcagatagggacgcaacaccagcatctggcggctccgcatatcgtcaggaactccggtcacatcaaaatgcacctccacattgcgtttctccttcttcacactcacattctccaccgccagctgtgccgccgcaccgaaagccggcaaaagaaatatcatcattatcaatattgttttcatatcccaaagccgtttatttagttaatcatgaatatgacagacacccccgccttcgtaggaccgaaataatggttgtcggtatttgccttgaacttgccgcaagtggcacactcatatttgtcataattcgtataaatatatcccagaccgaatgtagcctccagattccaacgtttgcccaaaatccacgaatatccgtaggcaagccccacaccggtaccccaaccctgatagcggtgattcttcgtagacttcgactggaagggaagacgaacggcactgatattaaactgggaataaccgctgtgcaaaccgaaaaaatgcccttggaaacgattgcagagccagtaacgggcttccgatatcaccgcccagtgcttgattttcttgtttttaccttcatcgagcgtccagggattgtaactaccggacagctccaacgtccagcggggagccagtccgaattcaaaacccaaattcatcgtcgttgtcgcatcgtacaacaggttggttttcacccctattttctgaccgaaaacagaggatgccatgcaaactgcaaacagcatcaaggtccatttccttaaacccgacttagccaacattactctgtgtcttttcataaacatcgtttatttctacaattcctacatcgcgttaaatgtaaggttgtcctctgcgaaaaattggttgtgtattgtaaataatgtgtatataccggggtctgtcgcaacaaattccaggcaggttcacagagggacaaccatacattacatcctgattacaaataatttaaagcacaaaaagacatcaagaaaaacgaacgttttttaatataagatttttccctcaaaaaggaatgaaaagaaaaaaagacaaaaagttaaataattgatttacaaataataaaggattatggatataggaatgatgaatgatgttgctcgactaaaaaaaacgttcgttttttcacccacaaaaaaagatttaattacttccaattcattttcatgactacaataataaacacaatttcattacaaaacaagttttttactaaaaaaatcattacaaaacaaactcctggcatacagatatttaatacaacaaaccatccaaaatatttacacaccatgttattatgttaaataacacaaagataaaaaacgcgcattttatgcaaaaaaaaaaaaaaatagaaataatattcattaaccatttaccctaccaaacattcgttcccctataccacaactccgcatcatgtccatatcccctccctatcaaatatatgacatctatatatcaaagataacacaactataagacaaagataacagcttgttatctttgtcttatagttatcatatatttaagttgaagatatatgggagctttgaactgccattttcaaatggaggagccatgcatgaaacaaataaattaaaaattaaaaacgcttatcatttgcatctatgatttattttactttcctttgcaatatcaattcaatccttaagaaagattgtttgaattataaagaggagttgagagactgggctcgatgaaactccgacaacctccggaaaatccgaaaggtgccaaaacccggcctgataacaggagttataatttaaaacaaaagaaacatgaaaaaagctgattatttatctgacgctatcatccggagcttccggaaattccaaattttcaatcttttcgtatcttctatggatatgcgctgcatgcgctgattattttttctccccgataaaatcgacaatagtttccgaaaagttcggaaatgataactgatgcaatatgctttcgcagaaagtataaaacagatatgctatatctgtactttcctgccaggccgtcacttgtcgtacatttttttaatccatacaagtatccatatttccaactttatccaaatgaaaacttatcaagaaataaacgaaaagataaaaaacggaactgctgtagtactgactgcagaggaggtttcagctctttcaaaatcactttctcctaaagaaattgcccaaaaagtagatgtcgtaacaaccgccactttcggtgccatgtgctcatccggagcatttctgaacttcggacacagcaacccacctatccgcatggaaaaaatcgaactcaatggtgtaaaggtcagcggaggactggctgcagtagatacatacgtgggagcaacggattgcaatccggcagtgccggcctatggaggtgcacacatcattgaagacttggttaatggcaaagatattacattggaagcatggggaaaaggaactgattgttacccaaggaaacacatcaaaactgtcatcaacaaagactgtatcaacgaagccattttgtataatccacgcaactgttatcaaaattataacgtagcaaccaattccaccgatcggataaaatatacctatatgggaaccctgcttcctaaattacggaacgcttcctacagctctgccggcgaattatcaccactgttaaatgacccggaatgccgcaccatcggactgggaacaagaatatttctttgcggaacagaaggttatgtcacttggaacggtacacaattcaatacatccaagccggtaaatgaatatggtattcccattggcaatgcccgcaccttggccgttgccggagacttaaagcaaatgagttccagattcctgcgcggagcatatatcgaaaaatacggagtgaccatgtatgtcggtatcggaatacctattccggtgctggacgaagacattgcacaaagagtttcaatccgcaacgaacagattgaaaccaatatattggactatggaaacggttgccggctattaggcaccacaaactatgcagccctgcaaagcggcacgattgaagtaggaggacacaagataaggacagcccccctttccagtctggcaaaagcacgcgaaattgctgatatactaaagacatggataacgaatggcaaattctatctgaccgaaccggtacgccccatgccgacaagtaccctcattcaatctttgaaagagacagatttatccatagaaaaataattcacaaactcataaactgcaacatcatggtaaaaaaatatatattttcattcccagtggatgctaccgaccgttcactgacttacgatttagtaaaaatatacgatatccgtatcaatatcttgaaagccgaaatacaagccgggcatgcaggcaatttgctggtggaactggatgctgacgaacaacaattggaaaatggcatcaaatatctgacagaaagtggtgtcaccgtcagccctgtatcaagcaaggtttcctataatgcagacttatgtatagactgcggcaattgtgtcagtgcatgtttttcacacgcgttgactataggagctccggactggaaactccactttaaccctgagaagtgtattgcctgcaagctctgtctgaaagcctgcccgctaaaactgtttaaaattgagtttgcagaataaaccgataaaaaaacttttgcaccatgaaacaatacatagaccggacctatcgacatcattttcgacacgaccgctggcactattttaccgttacatacaaagaaacggatttgtgtattggagtggatgccggttcttggcttaaagagatgtacgactggacaaattcctttgtaatcgaactgcgcaaccaaatggatgcatggattgcaaaccacccgacatatgcccaatcccttgtcccttgcgagacggaaagtgaagctccggcaatattccgccaaatggcagaagcatcccgcaaaagcgggattggccctatgagtgctgtagccggagctgttgctcaatatacgggaagagctctacaagagcacttttgcattcaggaaatcatggtggaaaacggaggagatatttatataaacctgagtgaagatgctgatatctcagtctttgcaggttcctctcccttatccgaacgtgtaggacttcacatccatgcagcagatacccccttagggatatgcacctcggccggtacggtaggaccatctttcagtttcgggaaagcagatgccgtcatgattgtctgtaaagacactctgctggcagacacctacgcaacagcttttgccaaccgaattcaaacacaggaagacatctccccctgtatcgagcaagtaaaatcgactgcagatattttaggagccattacaatcaaagatgatacgatgggaatctgcgggaaatttgaattgaaaatattctaaaaaaaacgatatgaataccgaacaattatataacatcatacaaaaacgcatcctgatattggacggagcaatgggaacagctatccaaaaacatggattaactgaaacggatttccgtggacaagaatttacgaaccaccccgtacatttaaagggaaataacgatattctgacattgacacaaccggatattatccgtaatatacaccgatcttatattgaagccggggctgatatcatcacaaccaatacatttaactcaaatgccgtgtcacaagcagaataccactgcgacaaactgatatacagactgaattacgaaggcgcacagttagcaatttctgctgcaaaaacagctgcacatccggtattcattgcaggcagtatcggtccaacctcccgcaccttgtctctatcgccggatgtcaacagaccggaatatcgtccaattgatttcgatgccctggctgcaacatacgcagaacaagttgccggactgattgacggaggtgccgatattctgctcgtagagacagtatttgatggtctaaatgccaaagcagctctctatgccattgaacatgtacaggcagaaaaacatacggctctacctgttatgttatctgccaccatcaacgaccgcagcgggcgtacgctgaccggccaaagtctgacagcattgtatacatctgtatctcactatccattattcagtttcggactgaactgttcattcggagcaaaggatttattaccatttgtcactgaattatcccaatatttgccttgcccgctaagtatctatcccaatgccggtctgccaaacgaaatgggagaatacgaagaaacgcctctatttacagcccaatgtttggaacaaatggcaaaagccggtctgctaaatatagccggaggatgttgtggcaccactccggcacacattgctgccatccgggcaagtttagaaaatataccaccccggcaagtgccttcccctgaccatactttgactgtatgtggtttggataatgttgtcgtagataaagagcgcaataattttatcaacgtcggagaacggacgaatgtcgccggttctgcaaaatttgcaaaactcatacatgccaaagcctatgaggatgccgcacaaatagcccgcaagcaaatagaggacggagcttctattattgatatcaacatggatgatgcaatgttggacagcgcaaacgaaatggcaacattcgtacgctacatcagtaatgaccctgatattgccaaagcagccctaatgattgactcttcggattggaatacgatactggccggactaaaaaatgcacaaggaaaatgtattgtcaactccatcagtctaaaagaaggtgaagagatattcttaagcaaggcttgcgaaatccgccgacttggagcagcagtcgtagtgatggcatttgacgaaatcggtcaggcagtaacatacgaacggaaaatcaccatttgtcaacgggcttacaaactattgacacaaaaagccggattcaaggcggaaaatattatttttgatgtcaatattcttgccgtaggaaccggcttggaagaacataatcattatgcagttgattatatccgagctgtaaaatggatcaaagaaaacctacccggctgccggacatcaggcggagtgtcgaacctgtctttttcattccggggcaacaatcctgtacgcgaagctatgcattccgtatttctctatcatgccatccgcgccggactggatatggccattgtcaacccgtctatgctgcaagtatacgatgaaatagaacctgaacttctgacaaaagtagaggatgttgttctcaaccgacacaacgaagccacagaacaattgattgaattggcagaacgtatcaaaggtaataaatcagccgacggaaaacctgtcaagaacgaggaatggcgcaaccgtccgttggaggaacgtcttgtttatgcacttattaagggcaatactgaatatctgactattgatctggaagaagctttaaaacaatatccctctccagtggccatcatcgaaggtccgttaatgaccggaatggacaaggtaggctcactattcggtgctggcaaaatgttcttgccacaagtggttaaatccgctaaagccatgaaaaatgccgttgccatcctgcaaccggaaatagaaaaacacaatcaagccggaggacagaaaacgaaacgccacaaagtcattgttgctaccgccaaaggagatgtacatgacatcggcaaaaacatagtgaacattgtcttgacttgcaataattttgatgttatagatctgggagtcatggtagaaaaccgacgtattgttgatgctatccgccaacacaatgcagacatcatagggataagcggattgattaccccatccctaaacgaaatggaaggactgtgcgaattactacagcaagaaggattaaaaactccgttgattgtaggaggggcaacaacctcatcggtgcatacggctgtaaagttagcacccaaatattccggctgcgttgtatacggaggagatgcttcgcataccgcaagcctcatcaaacgactgttgtctgaccctcaggaatacaccaaacaaatccagacagaacaagaacagattcgccatcaatattataatcggcaaacgaccttgctgccattgaatgaaatccgggaaaaagcccccaaatttcctttggcaagctaccaacagcctaaagaattcggtgaacacaatctaatcggcaaacacattgatttacaaaaattagtgggcaaaatagattggactccattctttcatttttggggatttaaaggaaaattcccggaaattatctatgaaaacgaagaagccgaccgcacctaccaagctgctttggaaatgcttggcaccgttatcgcaaaccatgaattcaatgcatcactcattgtacaattcttcaatgcccatcgcgaacaagatgatattgtattggagaatggcaaacgtctagctatgctacggcaacaaaaaacagacagcgaatgtttgagtctggctgactatgtcagcccggaaggcagcacaatagggctatttaccttgaaagtagaagattcccgtccacattgcgactgtcaggatttccaacacctactacgggaaagtctgtgtgcccgtcttacagaagcattagcagaatggatgcaagaacaagtatgcgaaggacttcatgtcattcgccccgcatttggctattcagcctgcccggaccattccctaaaaaaagatgtgttcgatatcttggatgctcctgaaaaaatcggtgtaactctcacctcatcatatgccatccgaccaacaaccagcttgtgtggaatgatattggcacatccacaagcacgctatttcagcatcggccaagtaggtgatgatcaaatgacagactactgtaaacgacggaatatcaacagggaagaaggtaaaagattattgggattttaaattagacaacaacatgactaaagttatagatattatcaacaaaaaaacggcacctttcgcttcattcgaactggtgccaccgctaaaaggcagcgacatcagtaaactttatgcctccatcgaaccattgatggaatttgctcccccctttatcaacattacattccaccgagatgaagtggaataccgtcagaaaaacgacggacggtttgaaaaagtgatattaacgaaacgcccgggttccgtagcaatagctgctgccatcatgaaacgctttcccgtggaagttgtgcctcatctgatatgcggaggtactagcaaacatcaactggaaaacgacttgatagacttaaactttcttgatatacaaaatgtggtagcactgcgaggagatgctattcccggtcaaaaatactttactcccgaacctgacggacaccgctatagttgcgaattagtagaacaaattcataacatgaatcaaggcatttatcttgattccagtttgacagatgctgttcatactaacttctgcatcggagtggcagcctacccggaaaaacattatgaagcccccaacattgatatcgacattgaaaacctaaaacacaaagtcgatgctggtgccgactacattgtcactcaaatgttttttgacaatgccaaattttacacctttgtagaaaaatgccgcgctgctggtatctccgttcctatcattccgggcctaaaacccatctccacctctactcatatagaaatgcttccacgggcattcagtattgatctgccgcaagatttaatgaaggaggttcgcaaatgtaaggacaataaagaaatctaccgagtcgggatagaatggtgtgttgcccaaagccaagatctactggcacaaggagccccagccattcactattataccatgggaaaggctgataatatccgtgaaatactgaaacgtacattctgaaaaaaggatgacagaaaaaagatttcaattttatttcagaatccgtatctttgtttgtaggaaaattgccataatatgaaaattctgattattgaggacgatccttcattacgcgaaatcatccgcaccactctggaaaaagaacggtatatcgttgaggaggcatctgatttccgtactgccgaagagaaagttgccgattattcttacgactgcattttattggatatcatgctgcctggaggtagcggactggatttactgcaaacatggaaaaaacagaataaaaaagaaaacattatcatcatatctgccaaagattcattagaagataaagtgctgggtcttgacctcggcgcagatgattatttacccaaaccatttcaccttgtagaactgatagcaagagtaaagagcgtcatccgccgtaatcagcgagatggcgcccaatacatagaatacggtaacatccgaatagacccggacaattaccatgtttatattgaaaaccagcaaatagaatttaaccggaaagagtatgatattctatattactttatccaacgtcccgaaagagttgtaaataaaatgactttggcagaatctgtatggggagatcacattgaccaagtggacaattttgatttcatctatgcacaaataaaaaacatacgaaaaaaactgacagatgcaggtgcaacggctgaaataaaagctgtatatggatttggctataaaatgatattaaagtagaggatacaatgaaactgatctacaaaatattaatccgtctgactccggctttgaccatcttgctaacaatatggggctatctcttttacgtcgctatcatagacgaaataaacgatgaagtagatgactctttggaagactactctgaaaacatcataatccgcgctttgtccggacaaaaactgccatccaggacagacggaacaaacaatagctactatcttacggctgtttctgaagaatatgccaacactacacctcacattctttatctggacaaaacgatatatacttcggaaaaaaaggaatatgagccggcacgtattctaattactattttcaaaaacagcgaaggaaattattttgaacttacggtaagtactcccagcattgaaaaagaagatcttcgtgatgcaatcttgaattggataatactcctatattttgtattactcgtaacattgctttctatcaatatttgggtgcttcacaaatgtatgcagccgctttacattctattaggttggcttgacaactacaccgttgacaaaggagagtccctcccccaattacatactagtatcacagaatttcaaaaattacatactgccgcacaaaaaaccattgaacgcaaccaaattatttacgaacaacaaaaacaatttatcggtaatgcttcccacgaattacaaacccctttggcaatctgccaaaaccgcctggaaatacttgccgaacaagacggaacaaccgaagaacaattgcaggaaatcacccgcattcaagacacactttcttatattatccgtctaaataaatcgcttttatttttatctaaaattgaaaacggacaatttcatgacaagcaagaaatttgcttcaatcaacttatacgtagacaactagaagactatcaagaaatatatgcttacaaaaacatcaccgtaaatataggagaagacggagaactgaagagagtgatgaatcccactcttgctacatcgttgataactaatctactaaaaaatacttatgtacataactttccacaaggcattatccacattcgtatcacccctcaatcactaatcttctgcaacagcggtgatcccgaacctttggatgaaacgcaaatttttcaacgtttttaccaaggaaaaacacaacgccaaggctcttccgggttaggactctctattactcatgctatttgcaacctttaccatatccatattcaatataaatatgaaggattacattgctttgaactatttttcaaataattaatctactggataacaacaacttttcttcttttacgtaagaaaaatcaaatgagcattccctatttcaaattcttttcagaattggggagtaattttgaatcgtaaaacttaaaaactgaaagccatgaaaaaaattattacattatttgtttgtttaatcgcatttgtcggattcgccaaagcagatgatgaccaaccaatcacagttaatcagttaccacaaaaagctcaagcatttatcaaccagtatttcgctaaaaaagaaatttcattagcaaaagtcgaaaaagatttttgggacaaaaaatacgaagttgtttttgtgaatggtgacaaattagaattcgacaaaaacggaaattgggaagaagtaaattgcaatttttcagaagtacctgccgacatcattcccaaacccattaaagaaaacattgccaaaatgtatcccaaagctaaggtattaaaaatagacagagattctcgaggatacgaagtaaaactaaacaaccgcattgaattagaatataacacagaattccaattgatagatatagaagattaaattataaaacactcaaaacacagatattatgaaaaagtatttattagcattagcagcaggattatttctcttcactgcctgtgataacgatgacaatcattcaaatcaacccaacggagccgtaaccaaaacatttgaagcaaaatttccccatgcatcccgcatcgaatgggaatacaagaacgactatgccatagccgaattccacaatgatggcttcgaaacagatgcttggtttgaccaaagcggtaagtggtatatgactaaaacagaataccggacaattgaaaacatccccaatgaaaccgtacgcaatgctttccaaaatagtgaatacaaaacatggagagtagaagacgttgactatctgaaccgtctggatgcagaaggaatctatattattgaagtggagcaaggcaagatcgagacagatttgtactattcagaagaaggcatattgattaaagccatcccagatgacggagacgattattatgaaaactacctgccgggaattaatcctaccaaacaagtaatcattgaaattgtccaaaaacaatatccaaatgccaaaatcatagaaatcgatatggaaaatggatttatagaagtggaaatcatagacaacggacgaggcaaagaggtcatctttgacaataagcaaaactggatcaacacccactacgatgtcagaaaaaacgaagtagaacaggttgtaatcaacaccataaacaaaaaatatgcaggttaccacattgacgatatcgaaaaatacgaaacaccaataggcaattactaccaatttgaactggagctgggagaaaaagaaaacatagtcaaaatcggtcttgacggcaagattatctaataaaaagatttcattatacattcaaaaaaaaacggaagtgcaaattgccttccgtttttttcttctgaactcgtttgcatacaaaaatattccagaatcgtatgcagatagctaaaaataaaatacattcgcatcaccaaatcgtcatgtatatgaatgcattcaaaccaatcgaaatcaaggataaagatttaataaactcctatattattccttctgacgaacaggattgcgacctttcatttgccaatctgtttacctggcatttccaaacagattccagttatgccattatccaaaacaatcttgtcattcgcttttcaaatccagatgaaggccatgaatattacttgccctttggcaatgataattgtatatcagccatagaagaattaaaaaaaacatccctatatgccggagaacgtttatgtcttcgaggaataacaccccaattacaagaaaagctagagcaatacaatcctacactttgggattattcagaaaatagagattatttcgattatatatactcccgccaagaactggcagaattaaaggggaaaaactatcaaccgaaacgtaatcacgtcaacaagttccgcaaaagctacaaatacacttatgagccgttaataccttctgctattccagaatgcctggaatttgaatcagcctggtgtatgaaacacggatacatagaaaatgacaacatccgcaacgaacgccgttctttgacaacagcattcaaacattggaacgaattagacctaatcggtttcatcattcgaatcgaaggaaaaattatagcctttacttttggacatcccatcaatcacaacacttttggcatacactacgaaaaagcagatgttaatatagacggagcatatagtgccatcaaccaacattttgcagcctccttgcctgagcaatatatttatctgaatagagaagaagatttaggaatcccaggattacgacaagcaaaattatcctatcaccccgtcaaaatactaaaaaaggccagagccatattaaaacattaagtaatcatactatgagaaaacagagcatcatgaatttatggcaacaatgcttccatgattcagaagaatttatcaaattctatttcgaacaaaaatatagggatgaatattctatgctctacacagaaaacggggaagctctctccgcttatctaatgttgccatacccacttatatgggacggaaagacatttatgacctcttatatatcaggagcttgtacagctccgcaagcccgtaatcgaggcttaatgacatacctgttaaaaaaagggttccaacaaatgtacaacaacaatgtggctctttccactcttatccctgcagaaacgtggctatatgaatattataaacaactaggatatgctaccgttttctataaatccacaaatctatggcaacctattcccattacatcttctacttacaaaatagaaatcgttaccgaaacatttgaatcaataacccaagaaagctatacctatttttcaaaaaaaatgcaagataaaccttgttatatagcgcacacattcgaagactataataccattttaggagatctttatttgtcaggcggaaaattaatcttaacccgccaatcgctagctccctattctatatgcggcatagctctagcaacttgtgaagaaacagaaattacagtaaaagagctactatacgacactcttgaaatatacaaccagctgcttacagtggctactgattattggaaagtaccccgagcagtttgccgcacctcataccattttccaacagcacaaccctatggtatggcacgcattattcacctgaagactctgctacaacattacgcagcaacccatcctgatctggaagaaacgctcagcgttgcagataatattctaccatgcaaccaaggaacatttcatatcgcacatggagaatgtctgaaaacaagtgacacactctctaataccgcgacagacattactgcacttccccaaaagctgttcgcctttctagacgaacagccctatatgaacttgatgattgattaaattaatcctatttcaaatggaaagacaaagtgaccagtacatttttttcattaataccccaggaaccagaatattccttaactagccgtaccgcttcccgatcgcaagccggatgtaatttccgtataatttttattcgacccagtttaccttttcgattaaaattcaaagacaacactacctccccttccactccttttgaagcagcttcttcaggataccgcaaagaatctaccacataacgttcgaaagaaacataccaatcatccctctcttcaaatctctcggcgactttgatctttgcaatttcggctttcttcaagaaactgtttactttatgacttttcaacaaaatcaaactactatccgacaacatcggacgtatctctttttttgatttagccgatgcataaaaaaatacctgcccggtatcgacaatttcctttttcaaatctgacgacaccatcagcctatcagtagattccttttctgctactacagcctccttaataatcaatttaccctgattttcagctacatcctctgcaatttgaaacttctgcaaggagtcctgcctatctgctactgattcttcaacatgcatcatcatagaatctttcattaactgcggtacagcgaccaacttaagtggttcatctaccggcacatataataatttccaagctactacaacaataacgagacaagcaaccgctatccaccaataattacccacacacctgcttccatgtattcgggtcttagcaatcctacggttcaagccctcaattattttgatatgatctccttctaccgctgtcaacccctccaaagcttcatacaaaaacgaatcagacagagcctcccgctccaaacgattggcctctttccctctttgctctttttgcaaataagtttttatggcattctgtctgtctttcataatctgacacctttctgttcaagacacaatttcaaatttcgtttcccgttctggatacaacttttcaccaatttcaggctaaatcctgacaagtcagcaatttctttataagattgttcatctatgaaaaactttctgacacaaatctgctgtttcgccggcaatttttccatacactcttccactgctttgtcattcctctcgtcctcttccctatctactagattcaaatcttccgaaaattccataaaactttcgtccaatacgaccgtttgaatacccgaacgattacgtaattccatcagacaacgattgcgaacacagatgtacaaccaagaattaaaagatttaatatcatactccgatagtttcgcaaataattcttcccaaatctgtatcaccatatcctccgcatcttctacagactttaggtactttaatgccaccccatacaccaaggctgtatagcgtccatagagttccaccaagaactcttgcaagtgctcctctcgataaaaagtcagcaactcactatcactatatgcctttagttttcttttcactgatattagaaaatctgcacaaatatagcgattctaactaaataaacagcatcaatatcaactgagccaagataacacgaataaacatagaaagaggatagacggttgcataagatacggcaggattatccccatccatcgttccattaacataattaagcgccattggattagccatacttccacacaacatacctgccagcgaaccaaaatcaattttcataaaacgcaaagcaaccatggcaaccagtactacgggcacaaacgtaatggcaaatccaagccccacccacaacaaaccttccggacgaaatacagtttcaaagaaatgcacaccggcatcgagtcccagacaagctaaatataaagaaagtcccaatccccgcaacatcagatttgcactgcgtgtcgtataagtaatcatatgtagacggggaccaaaagcacccatcaatataccaacgataatcggtcctccggcaatacctaacttcacaggataatcaatacctggaaatgaaaaaggaatagctcccaatgccagacctaatacaacaccaacaaaaacagctatcaaattcggttccttcaaactaatcactcgattacccaaaaccttctcaacattggaaatcgccgcagcctctccaaccacagtaagcttatcacccagctgtaatattaactctggagttgccaacaattgcactccagcgcggtagatacgagtaatattgataccgtaactattacgcaacttcaatgaacccaacttcttaccattaatttcagatcgactcacaactataatttgagaaatcaattgactatctatagcattccaatcaatatccttactgttccaatcagttttttcttccacaccaaataaaattttgatagcctcttcatccgcttctgtcgtaatcaccaaaagacggtcgccctctaacagcacggtatcagaagttggaatacttactttaccatcacgccataaacgagacaccacaaaacgatgtacagacaattgcgcaacttctttcaaattctttccaaacactccgggattctgaacttcaaaagctgcaataaaagtctgcttgcctttatcatcatcaacagcaacagccaatgagcgcctcggaaacattttacgcaaagcgataatagccaaaataactcctacaacacccaacggataggtgacagcacatcctaaagcaggatccccagcatctatattcatttgcttcaatgtctgctgagccgctcccaaagccggagtatttgtcacagcaccacttaaaattccaaccatatccggcaaagaaactcctgtcacaacatgcaaccctaatgacataatagttcctaccataatcactgcaaacgccaacagattcagagtcattcctccttttcgaaaagaaccaaaaaagccgggccctacttgcaatcccaaagcataaacgaaaataatcagaccaaagctttctgcataattcaacatctgcggatcgatagataaaccaaaatgtcctgctgcaatcccggcaaaaaaaacaaacgtcactcccaaggaaacaccacaaatactgattttacctaaagccaaccccaaagctgaaatcattgcaacgacaacaacagcctgaattacactatgttctacaaatatactattgaaccactccatgaatttagatgctttactcaaacaaggcacaaaggtaataataaattaaaacccactggtaaaatatattggtaaaaccttcattttgaaaggttaaagaggtcgaataccatcttcatttaaaacgttaacatgttaaaaaaacttgtattttacttactcaaaattgatatcataacttttggtactatctttgtataagttaactcatttataacaagagatataaagtgaacattgaaattataacatgaaaaaccacataccagtcaccattatcatctattttttccttataggaatttattcctgctcaagctctgctaagttagcgacacaaacagccgaatacacgatacccatttttacgataccggacagtctactcaacaaatgctgcatagatgaaaatttctattctatacgaccggctgaattttatgaaccaactctgcagatcagagattcgtttacaaacgttgaaaaatgcatggtaggactaaaagacgaaactcttttcaaaagacgccctgaaatcattctaaactttgaaaatcttgaagaaaactcatatttttttccccttcccggagcccgacttctttctgcttatggaagaagaaacggacgtccccatacaggtatcgacctcaagattaacagacgagataccattcttgctacattcgacggcatcgtccgcatggtgggctgggccagaggatacggaaatgtcgttgtcatacgccactataatggcctcgaaaccgtatacgcccataattcaaaacacttagtcaaatccggtgacaaaataaatgcaggaaccccaattgctattactggagcaacaggacgagcctcaacggatcaccttcattatgaaatccgaataaacggctaccccattaatcccaacattatcatagacttcacaacccaacaaatacgaaaccaacgcatcgtattcacgccaggacgaaaaggaaaagttaatattgaaacggtatagcaggtcagacatcctattttttcttcatatctcgacgcaccatcgccaaaaggagaaacactaataccaaagcaaaacttatccgaaaataagaccacaaacttgtttttgaccacaaatcctgataatcaatagtaaggaaattgacagcaaacaaccccatagcaagagctagcaaaacaatacgaaatattttcatcataaacacattaaatttgacacaaagatagaatttcttttcagctattcaccaaataaacagaacatccagtacatcataataatcaaaaacaaatggaatctctcatagatttaggatacttcggtctttttataggctcttttttagcttcgacagtcatacccatgagtgctgatgtacttctcattggaattctagcactaggaggtaatccttggatttgtctgctcattgccacaataggcaactggctaggtggtttaacctcctatggtatcggctggcttggtaaatgggaatggatagaaaagtggttcaagataaccaaagaaaaactacaacaacaaaaaaaatatgtagaccgttacggtatatggctagcattcttcacctggctaccgctaataggagatatctttgcacttgccttgggattctataaaataaagccttttacatcggccatatacatgctgtttggacgctttgcaagattttttatatggacagttctatatataaaatatgcagaacggtttatcgaactaatacaataaaccatcctgcaataaaatatggaaaaaacttatttataaactaccaatcaaagaagttaggttagccgtaaacaaacgaactgcaattgccaataatattataccaaagagcttacgcataacataaacaccactctttccaaataacttctcaacataataaacgtagcgaagaacaaaataaacaacggtcatattcaacgcaacagcaataattatattcaaaatattatactctgcgcgcaatgaaagcagtgtggtaaatgaggctgcaccggcaattaacgggaataccaaaggtacaatagtagcagaaccgcaaggactatcatttttgaaaatttccactccaaaaatcatttcaactgccaacaccaacaaaacaagcgcaccggcaacagcaaatgaagaaatatcaacattaaacaatgacaaaagaccttgacctataaataagaaggcaactagaataataaaagaaataatagctgctttgccagcttcaactttctgattcttctctcgcaagctgataataataggaattgctcctaaaatatcaatcacagcaaataataccataaaggcacttacaatttccttaaaactaaaatagatagacatagtgtgtaaattaaattaatgtgacgtgttattgttcaaatattaacaatcaaaagcgattaagtagtaattcaaacacaaaggtagcactttattcaataaagtgtcccaaagaaatgacatatttaagttaaatatgaaaacaacaaaaaaaagagagagtcacgttatagtaactctctcttgaaattcggcgccaacctactctcccacctttcggcagtaccatcggcactcaagggcttaacttctctgttcggaatgggaagaggtggatcccctcggttatagacaccttttaatttcttcaatatttataatctcttggcagtccgtatatattttgactcttcaggaaagaaaccaactaaaatatactccacttaaagtaaactttcgggtgattagtattgctcggctatgccatcactgactgtacacctgcaacctatcgacgttgtcatctacaacgaccctgtaaggatatctaatcttgaagctggcttcgcgcttagatgctttcagcgcttatccaatccatacatagctactcagcagtgcatctggcgacacaactgattcaccagaggtatgtccaacccggtcctctcgtactagagtcagagctcctcaaatatcctgcgcccacaacagatagggaccgaactgtctcacgacgttctgaacccagctcgcgtgccactttaatcggcgaacagccgaacccttgggaccttctccagccccaggatgtgacgagccgacatcgaggtgccaaaccgctccgtcgatatgagctcttgggagcgatcagcctgttatccccggagtaccttttatcctttgagcgatggcccttccatgcggaaccaccggatcactatgctctagtttcctacctggtcgacttgtcagtctcgcagtcaagcacccttatgccattgcactctacagacgattaccaaacgtcttgagggcaccttgagaagcctccgttactcttttggaggcgaccaccccagtcaaactacccaccatgcaatgtctccctaacgggattagacctcagataacagaagggtcgtatttcaacgacggctccataatgcctgacgacaccatctctcagcctccgacctatcctacacatctattacccaaaatcaatgcaaagctgcagtaaaggttcacggggtctttccgtcccgttgcgggtatccggcatcttcaccggaactacaatttcaccgagctcatggttgagacagtacccagatcgttacaccattcgtgcaggtcggaacttacccgacaaggaatttcgctaccttaggaccgttatagttacggccgccgtttactggggcttcaattcaaaccttcgtattgctactgagctctcctcttaaccttccagcaccgggcaggtgtcaggccatatacatcatcttgcgatttagcatagccatgtgtttttggtaaacagtcgcctgggcctattatctgcggctctattgctagagcgccctttatcccgaagttacagggccattttgcctagttccttaaccatgaatctctcgagcgcctgagtatcttctacccgatcacgtgtgtccgtttacagtacggataatcataacctgaagcttagcaggttttcttggtagttaatttacctacattattcgcgcagccgaagccttacgatactatcacctttcacctctagatacgtacttcactatatctatctctgggtacgggcttcaaccacctattccgtcaggtggcagtagtgtcatctctacgtcactgcatcgcagttatgattagtacaggaatattaacctgtttgccatcggtgtcaccgttcggttgaaccttaggttccgacttacccccgggtgattgacattgccggggaatccttgatctttcggcgtggagggttctcacctccattatcgttacttatgcctacatttgcttttccatacgctccaccatacctcacgatacggcttctaagccgaatggaatgctctcctaccgatgtattatacatacatcccatagcttcggttgtatacttatgcccgcgtattatccatgcaggaccgctcgactagtgagctgttacgcactctttaaatgaatggctgcttccaagccaacatcctagctgtctaagcagtcccaccgcgttttctcaacttagcatacaattggggaccttagctgatggtctgagttcttcctctttcgtccgtggaccttagcacccacgggctcactccctgtcttcatgtcttcgcattcggagtttggccggatttgataggcggtgaagccctcgcatccaatcagtagctctacctcgaagacaaaacaacagaggctgcacctaaatgcatttcggagagtacgagctatttcccagtttgattggcctttcacccctacccacaagtcatccgaaaacttttcaacgtttaccggttcggccctccagtttgtgttaccaaaccttcagcctgctcatgggtagatcactaaggtttcgcgtctaccgccactgacttcacgccctattcagactcgctttcgcttcggcttacgcacctgaagtgcttaacctcgccagtgacgagtaactcgtaggctcattatgcaaaaggcacgccgtcaccccacaaaggggctccgacagcttgtaagcgtatgggttcagggactatttcactcttctgttcgaagtgcttttcacctttccttcacagtacttgttcactatcggtctctcaggagtatttagccttaccggatggtcccggtcaattcggtcaggattcctcgtgtcccgacttactcaggataccactatgccgcataatattacgtgtacggggctgtcaccctatattgccgcactttccagtacgttccacttctattattttgacaataacgtggtcctattaccccgctgatgccgaaacatcaacggtttgggctgttccccggtcgctcgccactactgggggaatcacgtttgttttcttctcctacaggtacttagatgtttcagttccctgcgtttgcctaccttacggtataatacatcttcaatgtattgggttatcccattcggaaatccgcgcgtcaacggttatttgcacctatacgcggcttatcgcagcttatcacgtccttcatcgcctctgagagccaaggcatccaccatacgcccttgcttatttactttaattcatgcttactcgttattcacagtctttcgactattacttatctcgttgctcgttgtacatacttacatatgcacaatctgttgtggattatattctaatcgtttctttccaaaatgtcaaagaactgcgtaccataacggtactgtgacaggttaaaaggaatcgaaccttttctaagttccgaaaacctgtttgaagatttgttccagcaagtacgattcataataaccgatactccagaaaggaggtgttccagccgcaccttccggtacggctaccttgttacgacttagccccagttaccagttttgccctaggccgatcctcgcggttacggacttcaggcacccccggcttccatggcttgacgggcggtgtgtacaaggcccgggaacgtattcaccgcgccatggctgatgcgcgattactagcgaatccaacttcatggagtcgggttacagactccaatccgaactacgaccggctttcgagattcgcatcccatcgctgggtagctgccctctgtaccggccattgtaacacgtgtgtagccctgggtgtaagggccgtgctgatttgacgtcatccccgccttcctctcaccttacggtggcagtcccgccagagtgcccagcatcactgatggcaactaacggtaagggttgcgctcgttatgggacttaacccgacacctcacggcacgagctgacgacaaccatgcagcaccttgaaaatagctccgaagagaataactgtttcctgttacgtccatctccatttaaacccaggtaaggttcctcgcgtatcatcgaattaaaccacatgttcctccgcttgtgcgggcccccgtcaattcctttgagtttcatcgttgccgacgtactccccaggtggctcacttaatactttcgcttaatcccgtactgtatgtcgcacagaaccagtgagcatcgtttacggcgtggactaccagggtatctaatcctgttcgctacccacgctctcgtgcttcagcgtcagtcacagtctggtaagctgccttcgctatcggagttctaagttatatctaagcatttcaccgctacttaacttattccgcctacctcgtctgtactcaagctgaccagtattaatggctggccaaggtttagccatgacattttaccactaacttaatcaaccgcctacgcaccctttaaacccaataaatccggataacgctcgcatcctccgtattaccgcggctgctggcacggagttagccgatgcttattcattcggtacaggcatcgtcccactcgtgaaacttattcttcccgaataaaagaggtttacaacccatagggcagtcttccctcacgcgacttggctggttcagccttccggccattgaccaatattcctcactgctgcctcccgtaggagtttggaccgtgtctcagttccaatgtgggggaccttcctctcagaacccctacctatcatcgccttggtgggccgttaccccgccaaccagctaataggacgcatggccatcctttacctccgtagatttaactccattcggatgcccgaataaagtattatgggattttaatccacgtttccatgggctatccccctgtaaagggcaggttccatacgcgttactcacccgtgcgccggtcgccatctgtaattagcaagctaattacaatgctgcccctcgacttgcatgtgttaagcctgtcgctagcgttcatcctgagccaggatcaaactcttcatagtaataaaaactttaaattattttctctttagcccagtcattatccctcggaatttattcctcggactcgcacttgctgtttttcaaacctttcaatatcttaaagaactatctctttctcgtttgtctgtcgctcatttttaggagcgaaagcggatgcaaagataaggagttttgtttgatacttccaaattttttcgcatcttttttttcagaacttgttttcaaaatctcagaaccaatttgaagtctttcgttttgaaagcgggtgcaaaagtaatgcttttgtttttaacttccaaactttttgcaaagtttttttttgaagttttttttcgaagcctttcgccttacaccatcctgaagaactattgccatcagaaactgtctgtaaatcaattcttcaacccctcttacctcctctattgctttaggtgtcatttcctgattgcgggtgcaaagatacacccttttattacctatttccaaattttttgaccacttttttcatgaaaattttaaagtttttcgcaacgtgctgataatctgatatgtataaatgacggtttttgagacattaaatgctcggatgacagacatactgctattttactgctgaaatttggccaaaatcacctctgaaaagctctaaagaatgctattacggactgaaaatgctgcagagtatgccggtttttgctgattttatagatatatccaccctaaaactctgcattttctaccataaaaccggctatccaaccaaccttataccacaaaacaccccctattttccctccagcctcctacaattaccccttcctgctccgttcctcacccgaacctcagccgttatcgttcggagaagcttcgaaggaacttcggacaaagaacggagaaacgtgagacatctgtgagacatgggtgggacatccgtaagaatgctttcggagaattctataacatcaaacggtatatactatataaagaacggaatccacagataaagcaaatcctcccatgcgctaacgaacatgggaggatttaattgctatatatattatataggcacagaaaaatcgaataacgcaaaaaagcccttcaaatataaatgttgtaaagatgattttgtatatttgtggctcatagaaaaagagagtaattaaattatggcacaaagtccttccatacctaagggtaccagagattattcaccaggtatcatggtgaaacgcaattatatattcgatacaattaaaagtgtattcaaattatatggctatatgccgttagaaacacctgccatggaaaacctatcaaccctgatgggcaaatatggagaagaaggtgataaattgttatttaaaatattaaattccggcgatttcattggcaatgttccagaaaatgaattactggaacgcaatagtattcgcctaacaaataaaatatcagagaaaggattgcgctatgacttgacagtaccatttgctcgttttgtcgtgcaacatcagagcgaactgacctttcccttcaaacgctatcagatacaaccggtgtggcgcgccgatcgtccacaaaaaggacgctaccgcgaattttaccaatgtgacgtagatgtagtgggcagtaattctctattacatgaagtggaactgattcaaatggtagatgaagtataccgtcgtctgaaaatcaatgtacgtttactcatcaataaccgtaaaatccttgccggtattgccgaaaccatcggttatcctgacaaactaatagacatcactgtcgcaattgacaaaatggacaaaattggtttggaaaatgtcaatgcagaattaaaagagaaaggaatttgcgacgaggctatagaaaaattacaaccgattttaaatcttgaaggtaataatcttgagaaattagaacaactacgcacagtattaagagagagcgaagtaggattaaaaggtattgaagaattagccacagtattcaattatctggatgacttgcaaattgagacagaaatcaaattggatttgacactggctcgtggtttgagttattacaccggtgccattttcgaggtaaaagcattggacgcacaaatcggtagcattaccggaggcggtcgatatgatgacctaaccggtatttttggtctaaaaaacatgtcgggagtcggtatttcatttggagcagaccgcattttcgatgtaatgcaacaattagacctattccctaaagacaatacgaccactacccaaatactatttgtcaatttcggagaaaaagaggaaaagtattgtctacctttattaaaacaactgcgcacagctggaattaatactgaaatctaccctgaagccgccaaaatgaagaagcagatgggatatgctgataaaaagggaattccttatgttgctctggttggcgagactgaaatgcaagaaggcatcttgtcactcaaagacatgacgagtggagaacaaacaaacctacgcatagaagaagtgatagcaaagctgaataataaaaaataagaatatgcaaatatacagaaaagaactgcggccactgaaaagccatggctacgattcacgatgtccttgaaacgaagcattatacttttgcaaaaacgtaatattaaaataactaatcaaccaaataaactaatatcaaataacaataaaattatggtacattatatatcacccgctccgctaacgtttgaaatcattgacgatatcctgcataaggattacacattggcattgtcagaagagagcaaaaagttaatcaacgactgcaaagcttatttggatcacaaaattgagacttctgaaaaaccattgtacggaatcacaacaggattcggatcgctgtgtaaaatcagcatttcaaaagaagatttaagccaattgcaggcaaacttagtcatgtcgcacgcatgtagtttaggagatcccatccaccaagacatcatccgtctcatgctgttgctgaaagctcacgctttatcattaggaaaatcaggagtacagttggcaacagtagagcgcatcattgaaatgttcaacaacaatgtattgcctgttgtgcgtgaattgggttcattgggagcatccggcgaccttgccccgcttgccaatctgtttctaccgttaatcaatgaaggcgaagtatggtatgaaggcaaaatttgcgatgccaaagaaatcaatgccaaattcggttgggaacccatctcattaggagccaaggaaggacttgctttattgaacggaacacagttcatgagttcgcatgcagtatatgcgttattaaaagcattcaaaatttccaaatatgctgatatcatcggcgctctttcattggaagcatacgacggacgtatagacccgttcttcccacaaattcaggaggcgcgtcctcatccgggacagattgagacagcccgcaacatcagagcattactagaaggttctgagttccagcagaaagaaaaaacaagagtacaagatccctattcattccgctgcatgccccaagtacacggagccagcaaagacagcatcatgtatgtggcaactgttgtagaacgtgaaatcaattcagttaccgacaacccaactatcttcatggatgacgacctgattgtatcaggcggaaacttccacggacagccattggcattagtattggattttctgagcattgctctggctgaattgggaagtatttctgaacgccgtacctatcgtctgatttctggcgatagaggcaacataccagaattcctcgtagccaatccgggactgaactctggatttatgattccgcaatatgccgcggcagctattgtcagcaaaaacaaacaattgtgtactccctgctccattgactcaattccttcttccaacgagcaggaagaccatgtaagtatgggaggtaacgctgctacaaaaactgtaaaagtggcagaaaacgttgaacgcatcttagccattgaactgatgaatgcagctcaggctatcgatttacagcgcccgacaaaaacatctccctatctggaaagcttcctgaaggaattccgcacagttgtcccgttcaacgatgttgaccgcgtaatgtacaaagacattgatgcagcaacagatttcctacgctacggagattttgaagcaaatatcaaagcttaaaatagatttacatatagatttaaaaatgtgcgcctatgtgcgcacattttttttgaaaaattttctctttctgtttggcatgcataaaaatagtattacatttacagtgtactaatactctaatacaccattaacacattgccattatgttacaattaaaagaaatcacattcggctataacagaaagaaacaaaatgtattgcaacatttttcactttctttccagtcaggagcggtctatggtctgctcggaaaaaacggagcaggcaaatcaacactactttatctaatgagcggtctgctcacacctcgtaaaggacaggctttatttaaaggacagaacatccgcctaagaaaaccggctgtattacaagaactatttatagtaccggaagaatttaatttacccaacatttccatgacagactacgtaaaactaaacagtcctttttacccaagattcagccaagaggacatgaaaaactacctgcaatgcttcggaatggaatccggcctaaacttaggctcactttcaatgggacaaaagaaaaaggtattcatgagttttgccttagccaccaacacttccgtacttttaatggacgaaccgaccaatggtctagacatacccggaaagagccaattccgcaaattcatagcctcaggcatgtcagacgataaaaccatcatcatctccacccaccaggtgagagacatagacaaggtgctagaccacgtagtcatcatggacgagagcaaagtgcttctagaccaatctctgacagaaataagcaaaacactgttattcatcgaaagcgacgaccggaatctgctggacaaagccatctacacccttccctccgtgcaaagcaattggctgttattgcccaacgagcaaaaagaagataccgaaataaaccttgagttgcttttcggtgccaccacgacacaccccgataaaatcgcaacaatgtttcacactcaaatatcagaataatgacacagaatactatttttaatctatccagattcaaaaatctactactcaaagagttgaaagaaaacaaaaaaagtctgctactccgctggcttatgctatatggattcctgaccattacttttttgctggcagcccttcaatattatccgacatcacaaaatgaatataatgtttgggcattagaaatggctgccttcattggtattctgtttgtaacaggatgtgcaagcgcctcgctgatgatggaacatataaacactaaaaccaaacgcatatcaacactgatgctccctgcttcctcttttgaaaaattcatagtccgctggctgatatttgtagtattcttcctcatgttctactggatagcattttatctggcagactggactcgtatggctatctacagtgcggcatatcccgaaaatacactgatatcacctctgcctttatcggattttctatggaacccaggcagtgaatattgctatttcaaagccaggaaactaaccttgcttgccttttcagactatctggcaatacaatcattctttgtattaggcagctgtatttggcctaaaaattcattcatcaagacttttgcagcactcttcctgctattcggagtttacttctatttcgcatttttatcggcagaacaatatttgtccaacaaatatatatcagacccgttcccaaatttggtaaacgaaggcaaccaagaacttgtcggtatatgcatattaagcggtatcgtattgttcaactggattttagcatatttccgttttaaagaatctgaaattattcaacgctggtaaaacatgaacttcaaagataacaaagccatctttttacaaattgccgaccgtatctgcgacgatattctattaggaaacttcatagaagaaagccgcataccttctgtccgggaatatgctgccctggtcgaagtgaatgccaacaccgtaatgcgctcatttgactatttacaatcaaaagatgtaatttacaataagcgaggtatcggatatttcgtatcgccgggcgcacgaagccgaatacagtccctacgcaaagcgctatttctaaacgaagaggcagactattttttcaaacaactctataccttagccatatctaaggaagaacttttaaaaatgtaccaagaataccttgataaacaaccataatatgaaaaagacaacttacatcatgataagcatgctggcggcaggattcattgccatcagtagctatatagcatacttacacgcacatagtgttgattacaaagaaaacatcataaccgtagaaggagcatatttcaatgaaaaactacccgactgcaaggtggtaaaactaattcagccatctatttcctgtatagacaacaataattcaagctatatcagcggattttcgtttctatcgtctaaattgactgtcacaagcagccaatcggaagagggtttcctctctctggcagaaggctggaaacaatatcttgtcaaacagattgtggacgatacgcttatcctgcatttcaacatttctgagaatattctaaaacaacatcgtcaaatcccttattcacaaatattagtccgcacttctccgatatccttatttctatcccccaagactgaaactatacacttcaagctaaacggactgcctacctatatacaaaatattcaaagagattccatgaccatcaatgctaaaaacaacatcaacataaagaactgccacttcggcaaattagacgctcaaatttatggtataaaaatggacagtaccgaaatacaagacctttatatggacttggatatcgtttcatatacaaatacaaaaaacagccacatccacacagcacatctgacaggccgccgacaattctatcaccctatacaagtcgacaaatatgaccgtatcgaatggactccgctgaccccccaagctgaaatcacaatagaattaaaaggggcggcaagcattgagaagaaaaataaagagaagtaatcacattatttcccacattattttcaaaaaatatttcatatctttatggaaattatctcctgcttgcatcatataggtgataatcattcgctatgtcgaagaaaaaaacctaaagctatgaaactatattgccttctatccgccctactgctcgtcaccgtttgtgcagtatctgcacaaaccagacagcaggacagcctcatcaggctctacaataaatatccgaaaattgccctccaaaaagccgacagcctctacaaaaccggtgtcaaaaaacgcaacaacgcagcgatactggaagctctgattctaaagactaccttcacccttaaaaagaattatgaccaatatcctcaacagatacaatatttggagagaatcatacagaaggagaaagacgtagtcatgcggtcattgctccactcatatgtgggagaattataccaccaatactatttgcgcaacgcatacgaaatcaaccagcgtactgtactagaggacgaagttccggcagacatgaatacatggagtaaaaaacaatttgacgacaaaactaacgaacacctccttgcctctgtggcaccaataaaaaagctgcaaacgactccggcaaacatttatgacgccatccttatcaaaggagctgcctcagacaccttgcaacctacgctatatgactttctgtgtcacagactttttcaattagctcctaatatttccgatcaacaaaaagagtatcggacacttttaaaagatttatactgcgacatcaacacattcattgcctatcctctaccggacaatggagactaccgactcaaagtgtggcagcaactgctcacatttcgccttcaccaaagagaagaagcaccatcggcactattatgggcagatttggaacgcctccgacagataaactcattccaatatggcatcgaatatgatacactctatctccaaagcctggaaagaatgcaacaggaatatgcaggacaacctctagtcttagaaatatatgcagaatacatcaagctactttacgatctgtcctccaccaagcccatccaagaacggaacgaaatatggcgaaaagtctatgccatctgcgaagaatgtattcaaaaatacggtacgaatccccgaattgggatgattgagcatatacagaacaaattgaagacagaagacggcaacttcagctatcccctagaaatctatcctggcgaagcattcaacatgcagctaagatacaaatatctcgaacagttgcaaatagaaatcttcaaacttcctgacagtactctacacaaaagcacgatgtaccctatcaccgaggtcccattagaaggacgcttattccggaccttgactttcaatctgaaaaaaagcatatccatccaagacacgaccctccgtatagaaggactaccgggaggaatatacgccgtcaaaacacctgaaaacagagagtacaacttattgatatccacctcattttttgcacgaaagaccagagaaaacggcagcatcctattccaaatattagatgccaagagcggctttcccatacccaatgcccacgtaacattctacacgcatgaaaataaaaaattcagacaaatcgacagtcagacaacgaataaggagggtatcgtacaatacaaaacagcagagtatacagatatctactactgcgttaccaaccaagacaacccaagcggttaccttttctctgcatacggtaatcgcggcatagacgatgcaaccagccaatcatacacccgactgattaccgatcgttcggtctaccgcccgggtgaaaccatctacttcaaaggctacacctggacatccacaacggataccatccatgcaaatccaaggagcacccaacaaatatcattcagagatcacaacgatagagaaatcagtcatcaaaactttgtcagcaatcaattcgggtcttttacaggttcgttcataatacccactaacctcatgaacggcacataccaactatacactcccgacgggaaatgcagtattcaagtctgtgattacaaacgtccggaattcgaaataatactcgaaaagccccaacaacgaattaactttggggatacagtccgaatcaaaggcaaagcatgctgctattccggtatcctatttgctaaccaggcaatccgctaccaagtggacagactaaactatatcaccgatgatgtcagaaatgccactcaacagaacgaaacattcactgacgctgacggcgaatttgagatacaattcactgcacaaggaacgcccacttcaccatgtgaattctacaacattaaggcaaccatgacagacagtaaaggagaaacacaagaatcaaaactcggagtcatcgcctacaataacaaaccggcaccaagcctatggattccatggcgaatcaataaaacattgccagtaccctttatcatcgatttataccaatttccgcaagatacggcacaagaggtgtactaccgtctggagaagtttgtcccccacacaatcccgaaccaaaaaatcgacaccaccgtcgaaaaaataatcacggaaggaaaactgtctatcgtgaaccaagattccattatattgccgttacaaaatcaaccctctggcgtatatcgctttacagcagtatgcaagggcatgaaaaaagagcaattattccatctctattcaccaaaagacaagcagcctccaatagcgacctatgattggctagtgaaagaaaaaaccatctgtcaagacggtgaaaaagcacgtatattatacggtagcctgcacgacagtctctacatacaatatgaagtggttatcaacaataaaaccgtcttaagagaccacgtcattaccaaccatgaaatcacaactatcgagattccctatctaaaagaatatcccggtataatacatcttcgtctccagcatttaaaaaaccaaaattataccgaacactgcatcgaattaaagcgtagacatatattgccacacctgaaaatcgagacaagcacattccgtgaccatctgacacccggaagagaagaagagtggcaattaaaaatcaccaaccacggaaaaacagcctttgcagaagtacttgccatgatgtatgacgcatcgttagacaaactgaatacacataatgtacagttcagaccagaacatctgcacatatccgaaccatcttattgccaggaaaattatccttcattctaccgacaaagacacgacttttatggaagcacgcctattccgaagattcccaaattttcattcaactttctgaatctgtacaacatcatatatgaattaccctacgagcccattagaacaagacgctacaacagtggccatacaaaaatgtataattccactacaacaagaaaaactataccaaggatagaagctatgacaaacataaatcctgacatacctttacaactccgcaaaaacctacaaccaacagccttcttctatccgcaattgcagacagactctgccggaacggtaaacatccgattcacagtccctgatgccctgacccgttggagattcattgcacttgccaccacgcaggatatgggggcggcacaaattgaacggtatatcatcaccagcaagccactgatggtacgtcccaacctaccacggtttatgcgcagcggagaccaggcagaaatacgaacaatcgtcagcaacctatccgactcgatacaacggggaaccgtcacgctcgaacttctgattccaggaacggaagaggtcgtcgtcagaagagaggtaccgttccagatagcggcaaaacagaacagcagtgcctgcttccaatttgaagtccccgggcagcaccaccttctagtgtgccgcatcatcgcaagaggtacggacttcaacgacggagaacagcactatctcccgatactcgcaaacgaagtgctggtaaacacgacacaaccgatattcctcaacacagcaggcaaacataccttctcactgaaggagaaaagcgccggtaaccggaattaccggctcacgctcgaaatgactgccaacccgatatggtatgccgtgcaggctctgcccaaattgcagcaagcggcacatgaaaatgccacagacatcgtggctgcctactacgtaaatgccatcgcttcccgcatcgcccaagccaatccggctatcataaatgccatccagcaatgggaaaaggaaaatcagacggctaccgcctcacccctatccaaaaatccggaactgaaatccattctggcagaagctaccccatggactatagaggcacaaagccaaacggaacgcatacagagtctgtctgagctattcgataaaaaccgattggactatctgcaaaaagaagccttgaaaaaactggcagatctgcaaacgacagagggtggctggagctggttcaaaggaatgtcggcaaacagtttcactacaatgaatgtattagttgctatgaaacgggtatcaactaatgcccaacgaccactcaacgagcaagaaaaaacaatgcagataaaagccatacgattcctcgacaaagaaatctttcggacacccaaagcacgatacggatacatttctcacgaaatgattttatatctttatgtacgcagtcagtataacaacattcctatagggaaagcatcatatgcatataacgacttagtacaaatggccatacagaaatggatacatttctcattctatgaaaaagccctgttcgccatgaccctccaacggcttggacacaaagaggaggcaacaaaaatcatagaatcgctccggcaatatgccacggtgacaccggaatacggcatgtattggtctaataaccagaacaagatattccgttattctgctatccagacacaaactgccatcctcgaagcctttgaggaaattaacggtcatacccgagagacagagcagatgcaacaatggctactccgccaaaaagaaactcaggactggggctccgtaccttcgacagtagatgcaatacacgctctgctactcggcagcaacaccacattgacctcaaaggatgccgtcaacataaaaataggttctcataccctctcaacggcaaatgccaataacatccctagctatctgaaagtgtcctatcctgcacaggaaatctcaccgaacatgctgaaagtggagattgaaaagcagagctcgactcccagttggggaggcatctatttgcaaaaattccaacggctggacgaaataggaacacagggaatcatcctgaaggtcgataaaaaactctatatcgaaaaaacgaatgaaaagggtgacaaaaagctctttgccttagagggacagcctctgaagaccggagacaaagtgattgtacgtctcatcctctcgctgaagcaggacatggaattcctacatctgaaagacctgagagcagcctgtctggagccaacagaacaactgtctggctatgaatatagaggcgggatgtcgtactacaaagaggtgaaagatagcaacaccaatttcttctttgattttctaccacgcggtactcatatcattgagtatgcattctggatcaaccaaagcggaagctatcaggacggcgtcgccaatctgcaatgtatttatgcccctgcatacaatgcttacagcaactctacaacaataacagtccattaataaaaaaaacataagaccatgaaaccgtattatattctaatcatgcttgcgctttttgtcggtttttccgtatctgcacaaaccagacagcaagacagcctaattgactactacaacaaatttccagaaactgccatcaaaaaagcagatagtctctacaaaatcggagtcaaaaaacgagataatgtcaagattttagaagccctgattctaaaaaccaccttcacattaaaaaaagattacgatcaatatcagcaacaaatacaatacttagagggaattatccgaaaggagaaagacgtagccatgcgctcactacttcattcatacgtgggagaactatacaaacaattttaccagaacaattcatgggaaattgacgaacggacagaattggctgacgaggttccagaagatatgaacacgtggagcaaaaagcagtttgacaataaaatccgggaacatctcaaagcatccgtcgctccgcaaaaagagttgcaaaccacccctattgacatctacgatgccatcctcatcaggggtacagcctcggacaccttgcagcctacgctatatgactttttgtgtcaccgatttttttgcttgttcgccagcaggcgtccagcacctgatgacaaacagacatgcctgccagaactatatggtagtgcagagacattcgcagcctatccgctaccggacgactgcgacccggccctcaaagtgtgtcagcaactacttgctttccgtctgcaacagagagagatagctccggcagcactggtgtgggctgacctggagcgcatccgcagagttaatatgctcggcctaacatccgaaagcgaaaaactgtatatacagaggttgaaaaaaatgatgcaggagtatgcagaagaacccaccgtcgttgaagtcgttgcagattatgctatccatctttataacaaatcctccataaaaaagcctcaagagaaaaaagagatatacaaccacatatatgacatctgcgaaaaagcgatacagaaatttaatatgagtccacgcataggacgcttagaaaaaatggtcaatagattgaaaaggagaactgcaaacatccaattccctgaagaggtgtatccgggagaagattttgccatccggttgttctacaaaaacgtccgacaaattaagttggaaatcatcaaactccccaacaacatactgcacgagtactattcgggatactacaccggtagcaccaaaatcggcacactacataaagaattcacactcaatttaaatgaagaacttatcaatcaagactccactatccatatcaaaggtctgccggctggaatatatgcagtcggcataaaaggcaaggatctgctcaacaagccatacaaaatccttacatccacatcactattcggtcaaatccaaaagttcggcaatcaattcgatctacaggtactagatgtcaatagcggtttccccgcaaccaacacagacatagtattctacaaattcgaagattcacatttccagtacgtccataatgcagtcacagaccagaaggggtttgtacactaccaaaaagaaagagaccaagtattatactatcggattatcaatccagagaatcctggcggatacgtattcagaatctcaaaatcatattcccgtcctattcagacctgtgaatccaccacccaactgattaccgaccgatacatttaccgacctggcgaaaccgtatacttcaaaggctacaactggaacgccacaagagataaccttacagccaacgaaaacacaaaacacgaaatcatacttaaagatgccaaccaaaaagaaatcagcaagatatacagaatcagcaacacattcggcacattctctggttcgtttgtcatccctaacgacgcaatgaacgggacctactgcatagaaacacaaaacaattacagctacattaaggtagccgaatacaaacgtccggaattcgagataagatttgaaagtcccaaacaacactaccgcgacggagacaccatatgcatcctaggaaaagttgtcagctattcaggagtcaacctcaccgatgagccagtacactactccataaacggtattggcgaagtacgtcattttttgaaaaagattgtcaccgatggttcaacgattaccaattcatccggagaattcgagataaaattcgtggcccctcatatcatgtcagagaatgtcagtccaaggatacgaagatattacaacatcacagcaaatctgacagacagcaaaggagagacgcaagagagccgtaccattatcaccgtatacggagacacagcaaaaccaatgctcgaaattcccaagattattgacaaaacattacctgcagtattcggaatcgacctctccgactaccctcccaacgagccacaggagatacattaccggctggaaaaactcgttgaacaaactgtgccagacgcaaaaatagattccacagtcgaaaaaaaagtagcagaagggaaaaaagtcatgcagcaacacgactccatcacgttgcagctacaaaagatgtcatcgggagcctatctattcacagcagaatgcaacggtataaaagagcaacgagtgttcctcctttactcttctcaagacaaacgacctcccattgcaacctataactggatgattgaagaaaaaaccgtatgccacaacggcgaaaaggcacgaatactattcggaagctcactggagaatgtttgcgtacactaccaggtattttcaaataatcagaacgtatcgaacaaacagattatcttgaacaacgaaatcaagagcatagaaataccatatctgaaagaatatgccaatgaaatcaccctatacatctattgcataaaaaacaaacgctacatacaacacatcattccgctaaaacggaaacgggaactgcctaaactgaaaattgagacgacgatattccgagacaaactcacaccaagcaagcaggaagagtggcaattgaaaatcaccaaccacggaaaggcagccattgcagaggtgcttgccatgatgtatgatgcctcactggacaaatttgcctcccatcattttcaggttgaaccccaattactggacccattaagcattccaatattcgacaagccaacgtggagatttgagcgacaatccatagagacatacggtaagagagagaaatacactaatccctatacctctgcatacacattcaacaaactgaatctatacaccccgccacgcagcagaaacctattatacctgacaagcagtaggactccagaatacgaggaagatattgtttactcgatgtcgttttacgatgcagatatgggaagcagcatggaaacagaagaaaaactgacagcggtcccgtccctttcagagctggtgcaactccgcaaaaacttgcaaccgacagccttcttctatccgcaattgcagacagactctaccggaatggtaaacatccgattcacggttcctgatgccttgacccgctggaaattcattgcacttgccaccacacaggatatgggggcagcaaagattgaacggtatatcaccaccagcaaaccgctgatggtgcgtcccaacatgccgcgattcatgcgcagcggagaccaagcagaaattcggacaattgtcagtaacctatccgactcgctgcagcaaggcaccgtctcgttcgaactattgattcccggcactgacgaggttgttgtcagcagagagactccgttcaagattgctgccaaacagaacggcaatgcttgcttccaattcaaagttcctgagcagtatcaccttttagtgtgccgcatcattgcaaaaggtacggacttcaatgacggcgaacagcactacatccccatattatccaatgaggtcctggttaacacaacccaaccaatattcctcaacactgcaggcaaacataccttctctctgaaggagaaaagtgccggcagccgcaattaccggctcacactcgaaatgacagccaacccgatatggtatgtagtccaggctctacccaaattacagcagccagcacatgaaaatgcaactgatatcatagcagcctattatgtcaatgccattgcatcttgcatagccaacgccaatccagctatcataaatgccatcttgcaatggaaaaaagacaattcacaagatgtcgtctcccccttatataaaaatccggaactaaaatctattctggcagaggcaacaccttgggcaatcgaagcacaaaacgaaacagaacgcatgcaaagcctatcagaactatttgacgaaaaccgactagagtatctacaaaaagaagcactgaaaaaactagcagaattgcaaactacagaaggtggatggtgttggttcaaaaacatgcctgccaatacatttattacattgaatattctgactgccatgcaacgcgttactctctatgcccaaaaacaatcaaatgaacaagaaaaaagaatgcaatttaaagctatccaatatcttgacaaagaagtgataaaagaatacaagaaaaatagtaaacacatatcatatgaacaaatcctgtatctatatgtgcgcagcttgtacaacgacattcctctcggagatgcactagaagctcataaacacctcatgcaacttgctattagacaatgggggcgctcttcattttatgaaaaagccttgctagcaaccatattccaacgtcatggtttcaaagagcaggctcaaaaaataatagagtcgttgcgacaatatgcaattgtcacaccagaatatggcatgtattggccaaacaaccaaaatattgtattctataattcggcaattcaaacacatacagccattttggaagcttttgaagaaatcaatggccatacactagaaatagatcaaatgcaacaatggctacttcgccaaaaagaagtgcaaaactggggggctataccttcaacagtagatgctatacatgccttattacttggtggaaattcaactttaacagcaaaagatgtggtcaatataaaaatagggacacattcactttccacagcaaataccaataatactccaggttacttgaaagtatcatattcagctaatgaaatctcgccccatatgctcaaagccgaagttgaaaaacataattcatcgcctagctggggaggcatttacttacaaaaattccaaaagctgaaaaccataaaggcacaaaaaactattcttacaattgataaaaaactatacatagaaaacatcaatgccaatggcaaaaaagaattaatttcaacaaacggacgcactttaaaaataggagaaaaaataattgttcgtctcaacctgtctcttacacaggacatgcaatatctacacttaaaagatctgagagcagcctgccttgagcctacagaacaactatctggatacgagtataaaaatggcatatcttattacaaagaagtaaaagatgcctgtaccaatttctttttcgacttcttacctcgcggtaattatgtcatagaatactctgccttgataaatcaaagtggaatctatcaggacggaattgcaagtatgcaaagcatttatgcgcctatttacaatacatatagcaattcaaatacaattattgtcaacgaataaacaacaatggttcttatctgatcaaaaagggagcagaaaaaaaaactctactccctttttatacaatttcttcagaaaaaaaatcactcttctataaccaaacgaaagccagatccatgaacattttcaattctaatattctgatcatctttaaaatattttctcaattttgtcacatagacatccatacttcgagccgtaaagtaatcatttgtcccccatatttcagtcaaagccttttcgcgaggcaacaaaccatcacgatagttataaagtagctccaataatttagcttccttgggtgttaattttatctgctcgtcattttttgaaatgatacgcaactctgtattgaattcataagctcctatatttataaacttagatctttgttcaaactcttcgtgtttactacgactaagaattgcttttatttttaaaatcaaaacttcagaatcaaacggctttataatataatcatcagcacctatctcataccccaacttcatatcttccttcatactttttgccgtgatatagacaaaaggcacagctgtatctaattctctaatttttttacctaaagtaaatccatccatttcaggcatcattacatctagtagacaaatatcatatttatcctttttgaaagcttccaatccttcattaccattaacacataaggtcacatcataatctgatagttccaaataagacttaagtacagaaccgaaacaaggatcatcttccactaataaaattttctgtgccatatattttttattttaattctataattctatttctaccaatgttcctttattttttttagaggacaacctaacagtacctccatgcaactctacaactgattttacataacttaaccccaaaccgaacccctttacattatgaacatttccactaggcactctataaaaacgcttgaaaacctttttctgtgcatctttggaaataccaataccatgatcctgtactcctattagcaaatgtccatttttcacttgagtatatacttttatgtttggaactcctccagaatatttaattgcattatctatcaagttacatacaacattcatcatatgtacttcatcaaccttactgattaattcaccatccactaaatgacaatccaacgaaccaccagcatcctgcaccaacaacataaaatgtcccactgcttcacgaacaagttcatttacatcagcatcaaccaaattcatctgcaattctttacgatcaagctttgcttgttgcaaaattcgctccacatacttattcatacgattattttcactttttatcatcgcattaaatttaagtatttgttctctgtcattcagaactttatctttagtcaatgcagaagttgccaacgatattgttgctatgggagttttaaattcgtgtgtcatgttattgataaaatcattctttataacagataacttttgctgtcgcatgataataacaatagtgacaataaatacacataacaatccaaaaatacaaaatcctgaagacagaaataaccaacccatattttcgagcaaaacaggctgcacagattcaaaacgcacccccaaataataacctttcttaactaaatcctgctggaataaatctacataatataaattttccgttcgacctgctttcacgttatctaaaacattctgcttagtcataatctcataggtaaagggaagattaatattataagctcgaaaattattaactagcatccccgccaaatctatattagccaatctctgcgaaacggatacattctcaggatctttttcctttactaaacgcatcatgaactcctgcattttctgactaaaacgcacataaaaatctgtacctgaagtagaatcttgctggggcagctccattgatcgaatcgtttgcataataaattcttggtctactattttccctgtcccagaatgcaccaatggaattgcaggattactcagataagaccgcccactactcaaacgatttaagtcattattcaaaaaattgacaagattatcagcataccaaccaatattcgttccagtaccttgttgggcaacaatcatatcattataactttttatttctcccaactgctgactcatttcgcgccggtatttgatataattaatttcatctatgcgcccaacaactttattcagcacatcataaacttgtgacgtgaatttattctctcgctccttgatagcatattttatccacagccactgcacaacaactactgcagtaaaagctgcaaccatgataaccaacagtgtatgcaatatcaattttttgatcatagtaaaagatatagtagcggtaaaaataatattatttacaaaaaaatcaaaatatcactctatccaaaattggatactaaaaaggggtacccccaggtaccccctaaaaacaactaagtaataaaaacgggaaaacaaaaccatttgcatggtttttttctttattgcattttttcagcaacagtcttatacaaattgctctctttattaggaacattgattaatttaaacaaacgtttctgcaaatcagtactatcctgcaactcatcttgcaacaagaaaagagataattcctgagttggattagcttcaatcaaattcttcacataattcgcacgagcacgaatatagcgctgacgttgtaattgaaaaacacccaacatcacctcatcatttgcattacgtttttctttattcatcaatttctgaatatttttatcaattggctctataggtccttcatatttttcagcaaacatctttttcaacttattgtattctttgtctaatccagacccctttacctctatttgatctgcaaatttagcttttccttgaatccaaatctgatctttagagtcaataattgttgtcaatgtatttttaccagcgatatcgatccacacacgcgcagggatttgtaattgttctgtttccaaatcaattttaccatctgttacttcttgctgtgccagcactaccattccctgttgtccaggcatttcagccaacaactttacagttcccactaaatctttcacatctccacgaaccttcactttgttggagttacatgcactcataatcagtgcaatagctgcgattaataaataaatctttttcatcttttattatctttgtttccattttcgtatttaccacaaagatacaaaaaaactacatcgcacaatggttttttgagaattgtttaggcaattagagttttttatataaacctcattttaaacttctaaagcttccaagtattgaataatttgcccagatggacgaggagcattagaagtgattatctttccatcaggtgcaatcaaaataaaacgcggcacacttattatcatataatctctgctaaaatcactagcagcatctaccaatgtatgcacaccagcaaaaggatggtgattaaggtaatccttccatttatcaatattagcaggaccatcgattgctattgtcaagaatttaatattacgattactatactttttttgaagcaactccaaataaggtaattctgatttacatggaacgcaccaagtcgcccacaccgtgatatataaataagagcctttaaaatcatctaaagaaacattattgccacagcgattgacaacagtaaaatctggagcctccttacctgctctaattcgttcccacaatgctatcatatcttccatataggctattttactcttatcggtacactcttttctaaaaactgataataaataatcagctccatccaaaccattattttcccaaatatgtcgataaataatttcagtaagcaaaaaattctttatggcaggattcgttatttttgacaatacataatctgcaataccatctgaatagttttcgtcaataccgcctcttgttccctgcatatatatatagctcaacaaaaaagagcggtaatccttagcaccaaacaaagcatcattattcaaggaaaaagaagacataaaatcaacaaaaacaggtccgggacgatatgcactatcagctttcattttccgcctataaattggataaaacgaaactctttcagcgatcgaatagcgtattctttccttctctaaaagcgtaaatgattcatcaaaattttttgcttccaagagtttcgttttttcatctataagctccttcattttacccacgaactcttcttcttccaaagtataatagtctttatcaaaaaatacagcaacctcttgctccttcaaatagctatttataccacctaaactacccctaaaatacaatgaaccagaaaaattcaatgcattcatataaatttccaaattctctcctggggacaagtataaattcaaagaattgtgcaacatagtaacatatccgctatgctccatgtgaattattcctgtaaagaaattattttcatccaaagggaaagtgtaaatgctgtcgtctacccaaatacttacaatagaatccccattttctacccgcccactaatctgtacggtattatcacgagaacaagagaaaaacaatcctattaataatacaaaagtaaccaattctttcatttatttcctccaattataataatctgaaacacaacggctagcaaatatagatgataataaagaaaagatgagttaaagaaaagctaaatatacaagaatatgaatataaaacatttacaaaagaaggctgcagttaaaaactacagcctccatcaattagactattatttacctaatacaaacgtattatttatttgacaattgcctgaaaatctgcatttccaaacaatttaacaaattccatatcagttgcagccaacttcttcaattctgcattttttgcacaagctgcttttaaatttgaaagaacagcattagtatcattattacgtgcagcaataacagccttcaaataaggaaccattgcgttatcagaagtatttgcgttcaattttttagcagcttcgctagtatttcctgccaacaagttagccaaagcagcatttacacaattgcactgaccaaacaactgaacagcagtattataatcacccttcataatcgcaataatacctttgttataatttacttcatcaccagcacctgtagcagcaccaaacaacacctcagcgtcattgatgtttccattttttaactcaacagcacccaagttatttttaacaactttattgtttgctgacaactcatctgctttctggaaattagttttagcttcagctactttacccatctcaaacaaaatcatacctgcatcattgaaacctctccaatcattagaaaactgttttttagcagtttcataaatagctaatttatctgcattattttcaaacaatgttgcagaataaagcaattcttctacattcaattcagatggattagattttgccaattcacgtaactcatcgtctgacttaccaatacgatcagcattaacgataaatttagaacgtctcaatttaggaagaatttgatcagcaactacagtgaatgctgaagaaatatttttaatttctctctctcttacttctggatctgaatgcatagccaatacacgaagaattaattctttgtcacgaatattagattcttccattgctttcttgaaaccttcccagtcttcagctactacatattttttgaagaaatccaaatctttatattcctcaactttgtttttcttcatattattttttacaaatttatctgcagctccctcacgattacctgctaatttttcgttcaaatcaagaggaccatcaggagatgcgtaagactgaatcatgatgtttttcaactccatatcttcagcagcttttgcatctttaataaatttctccatagctttgatttcttctgacttcatttctttagaacgaatctgagaagagttaatcaaataatagattgcagcttcctgctcttctttagttatacgttcaaatttatcagcaccaatagcaatcgacggattattgtttaccaatgttgcagttgccaatacaccatcagcgattttgtttgattcatattctacagtcttagaacctttagaaccaacaaatctcacatacaaaccagaagaacgcataccttcttcaaacggaactactccactataagaaacagccttaccttctacatatggcacaacttcattatttccctgaactttttcaccctggaatgttttagcttcgtaagccttctctccaccattggcaaatttcagcacaggagtagcaaccaaagttactttcttattaaaatatttagcagggatagttgcatcaatctttactccaacctgtcctcctctagcttccaatatttcaggagtcactttataggcaatatttttctccatttttttcatcttattcaatgaagcacaagatgaaacaacaaaacctgccaaagtcaacactgcgacagttctaaatgtctttttcataatcacatcaatttattttaatactaatttaattgctcgttacgcaaagcaaatatatacaaaaaatataatactacataactaacaataggaaaataaaaaaattaatccacattcaatttatgcaaaatcaatttctttgctttttctattgcacgatcaattccatttggatctgagcctcccgctgttgcaaaaaaaggttgtccccctccacctcctttaatttcttgtgcagcctctttcactatttgccctgcatgcaagccaaatccttctaccaaaccattacttatcatcaccgtcaaagaaggcttacctcccacgacaccacctgtaacaaaaacaatcttatcaaattcaccctttaattggaatgcaatatccttagcttgtgctgccgggattgacaatggagttacaataacatttacatcgttattatacacttgcttctgatttttcaaacgttccttcatcaaacgaagactttctttggcaaacttctcagtttccttcttcaaaccttcattttcttcaacgagcaaacgaacagactctagtaaattcttattatttttaaataacttctctatctcccgtatactagtataggtattattaataaattcttctgctttatctgccgttatagcctcaatacgacgcactcctgccgacacagaactttctgataaaatcttaaagaaaccaatctgacctgttgcagcgacatgtgtaccgccacacaactctattgaatctccatactttatcacacgcaccaaatccccatatttttccccaaaaatagctatagcgcccatttcctgagccttagctattggaatggaacgaaactcttgcaaaggaatattcttacgaatcaaacgattaactatcgcagccacttcggccaattcttcttctgtaactttttgaaaatgagaaaagtcaaaacgcaaatgctcatcactcacatatgatcccttctgctcgacatgagaacccaacactttacgcaacgcataatccaacaagtgagtagccgtatgattattcgctgtcaaaacacgtttctcttcatcaacctttgcaacaaacgtctgagtaacatcttccggaagtttttcaacgatatggatagtcagaccattttcctttttggtatcaacaatcgcaacagtctcattttctcctatcaatacaccacgatctcctacttgaccaccaccctcaccatagaacggagtaatattgaaaaccaaatgatacatcactttattcttagtcacaacctttctataccgagctatctttacctcaacctccaaataatcatatccaacaaacttttgttcatcatctccaagcagttcgatccaatcatcggtgtccacagacgcagcagaacgagaacgtgctttttgcgcctccatttcagcctgaaactcccgacgatttacaaccaatccctgctctcgcaaaataagttctgtcaaatctaaagggaagccataggtatcatataactcaaaagcaacgtttcccggtattgtcacaaaattatcagcttttgtcttagctataattcgatctaaaagtttaatacccttatccaaggtgcgtaagaaagcattttcctcttctctaatcactttttcaatcaatccttgttgagagaccaactccggatagtgcgcacccatcacctccaacaacacaggcaccaaacgatacataaatgcatctttctgattcaaataggtataagcataacggactgctcttcttaaaatacgacgaatcacataccccgcttttacattagaaggcaattgtccgtctgtaatagaaaatgctattgtacgcaaatggtcagcaatcactctcatggcaacgtctgattcagacgacgccccatatttgactccactcaaatgggctatctcatcaataataggagtaaatacatctgtatcatagttcgatgttttaccttgaaccgccatacataaacgttcaaatcccattccagtatccacatggtgattaggcaaattttccaaagagccatctgctttccggttatattgcataaataccaaattccatatttcaatcaccaaaggattatccttattcaccaattctcgtccagacttcaaagcccgctctgcatcaggacgtaaatctatatggatttccgaacaaggaccacaaggacccatatcacccatctcccagaaattatcctttttattaccaagcaagattctgtcttcaggcaaataattcatccaaattttcttagcctctgaatcctcattcaatccatcatcctgacagccttcaaatacagttgcatacaatctatttttatccaacttcattacttccgtcaaaaattcccaagcataagcaatcgcattttctttaaaataatccccaaacgaccaattccccaacatttcgaacatagtatgatgataagtatcgtgtcccacctcttccaaatcattatgcttgcctgacacgcgaagacatttctgagaatccgcgacacgacggcttttgggactgatattccccagaataatatccttaaactgattcatacccgcattggtaaacatcaatgtgggatcgtccttaaccaccataggtgccgaaggaacaattgcatgtcccttactttcaaaataatccagaaacttctgtctaatctctgctgacttcataatatttaacgtataaacttttgacctctaaggcaaactaaaatatagagttgcaaaattaaattatttctttaactttgcatcaaaaatatcaattttatccgggaaatgtcaaaaacaggttatcgttttaatccagaaactttgtcatatgacaaaattcgcatcaccaacaaaagaaaattgtggtcctggattgttaaattttttcaaagtctctcattagccattgtcatattcttcattgttacctccataattgattccccaaaagaaaaggctctcaaacgagaaaaagaagaattacttgcgcaatataatctattggataatcaaataaacagactagataaggttctaaaagatctggaaaaccgagatgataatatttatcgtgtaatatttgaaaccgagcccattgatgcttccattcgacgcgcaggcacaggaggtagcaacaaatatgaggatattaaaaacatggataatgccgaactcataattaatactagcaaaaaactagatgaactagcaaaagccatgtacatccaaagccgttcttatgacgaaatagagcacttagccaaaaataaaatggatatgttagcctccattcccgctattctccctgtgtctctaagcaacaaggctgtacgtttttcctcatcattcggatatcgcatccacccaatatacaaaacagtaaaattacatgccgggatggatttctctggcccgataggtacccccatatatgcgaccggtaatggtaaaatcacttcagcttccacgcataaaggctatgggaaatgcattgaaatagatcatggcttcaaatacaaaactgtttatgcccatttagacaaatacaatgttagagttggacaaaaagtaaaaagaggtgatattatcggttatatgggtaacacaggacgttcaactggtcctcacattcactatgaagtgaaaaaaaacaatgtacctgttgatccgatcaactattatttcaacgatctcacggcagaagaatatgacaaactagtactggaagccaacaacaatggacaaacaatggactaaccacacaacactcacatggaacaagaaaaacaaatattaaaagtatattattctattggcgaagtagctgatatgtttggagtaaatccatctcttatccgattttgggagaaggaatttgacattatcaaaccacacaaaaacaaaaaagggaatcgtcaattcaccaaagcagatattgataattttcatttgatatatcacctggtaaaagaaaaaggaatgactctaaagggagctcaaatgaagttacaaaaaaacaaagaagaaacagagcaaacatttgaagtcattaagcgccttaaaaatatccgcgaagaattaatatccataaaagaccaactttcataatcatcagaaaacttacccaactatgctagtaaaagatataacaaccatcatagaagagtttgctcccctgtctctccaagaaagctacgacaatgccggtcttctttgtggtgatcccaacaatagtgtatcctcaatccttctcacaacagacataaccgaggaagtgcttgacgaagcaatttcagaaggccataatctaatcatctcacaccacccgcttatgttgcaaggaattaaaaatctgcgtgccgacagttatgtgcagcgctgtataataaaagccatacgcaacaatctaaatctctattctgcgcatacgaatttagatgctgtaatgctaggtgtaagcggacgaatggcagataaattacagctcacagagagagagattctacaacctgccggcaaactatacagccttgcgttttacacacctatcgccaacgcagataaagtacgtcaagctgttttagattgtggagctggacacattgggcgatatagtcattgctcgtataatagtatcggcaacggaacgttccaagcacttgagggtgcacgcccatatgtaggaaacatcaatcaattacatacagaaaaagaaataaaaacagaaattacagttccggactatctactacaccgtagtatagaagctctaaaaaaagctcacccttatgaagaacctgtttggaatgttgtatgcattaacaacacaaacccaatcacaggatacggaattataggcatgctctctcagccagtaaaaagccacgactttctgcaacaagtaaaaaatatcttcaagtgcaatactatccgccacacagcactctgcacaccgaccattcagcgcgttgctgtttgcggtggatcaggagctttccttacaaaaacagcaattaacagaaaagcagatatttacatcacaggagactacaaatatcatgattttttcaatgctgagaataaaatcatcatagcagatatcggacactatgaaagcgaacaatacacaaaagagattttttatgagctacttataaaaaaaatatctaactttgcagttcagttttcaaaggtctgtacaaatcccgtccattacctttaagcagacaggatgcctaaaagacctaaaacttgtaacctgttaacttgtaacgaattttatatggcaacgaacaacaatgacaaactgcaagaactttctgtcgaagaaaaattgcagcacctttacgaactacagcgcattgatactgaaatagacaaaatcagaacgctgcgaggtgagcttccattggaagttcaagacttggaagatgaaatcgccggtcttgagactcgtttggaaaacctaaaaaatgaaatcagcgaagctgacaaaaacgtatccgcaaaaaaacaggaaattgcaaaatcagaagaactgattaaaaaatactcagaacagcttgataacgtacgtaacaaccgtgagtacgatgctttaacaaaagaagttgaattccagaaactagaaattgaattgcaaaacaaacgcatccgcgaatctcaaaagattaaagcagaaaaagaagttaatctggaaatttcgagtaaacaatacgaggagaaaaaagcagatctagaagcaaaaaaagctgaattagatgacattatagcagaaacacacaaagacgaagaagagctgataaaaaaatcagaagaattatctgccagcatagaagaacgtcttttaactgcatatcgtaaaatccgctccaacgcacgtaatggtttagctgttgttacagtagaccgcgatgcttgtggaggttgttttaacaaaattccgcctcagcgccaattagacatccgttctcgcaaaaaaatcattgtttgcgaatactgcggtcgtatccttattgacaaatacatctgcgactatgatggtagtatgcagaaagcagaccttgaactggcaatggaggcacagaaaaagaagagtagaagaatcaaaagatctgaagattaaaaagaaagctgctacggcagcttttttagaatgtatcaatatataaaaagtatgattgctgcaaattacaatccaaaagaaagcgaagagaaatggtataaatactggatggaccatcatttgttccattcagaagtggataacagcagagaaccttactgcattgtcattccacctcccaacgtcaccggagtgctccacatgggacacatgctcaacaacacaatacaggatgccttagtacgtcgtgcccgtctgcagggaaaaaatgcctgctgggtaccagggacagaccatgcctccatcgcaacggaagccaaagttgtagcaaaactccaaagtgagggcataaaaaaaacagacctttcacgcgaagattttttaaaacatgcgtgggattggacacatacacatggaggcattatccttaaacaattaaaacgccttggcgcctcctgcgactgggagcgtacggccttcacgatggatgaaaagcgtagtgaaagcgtgctcaaagtatttgttgacttattcaacaaaggtttcatctatcgtggcgtacgcatggttaattgggatccacaagccttgactgcactttctgacgaggaagtcgtttataaagaagaacacagtaaactatattatcttcgctatcacatagaaggtgaagatggttatgctattgttgctactacacgcccagaaacaatcatgggagatacagccatgtgtatcaatcccaaagacccaaagaaccaacatctgcgcggcaaaaaagttattgtgcctttagtaaaccgcgtcattcccgtcattgaagacgaatatgtagacatagaatttggtaccggttgcttaaaagttacaccggcgcacgatgtcaacgactatatgttaggagagaaatacaatttaccctccatcgacatattcaacgataacggcaccatcagtgaagcggcaaaattatatgtaggcatggatcgttttgacgtacgtaagcagattgagcaggatctacaagctgccggtctgttagagaaagttgaaccctatactaacaatgtaggtttttccgagcgtacaaacgtacctattgagcctaaactatcgatgcaatggttccttaaaatggagcatttggcaaaaattgccttgacaccagtaatggaagatgacattcgtttcttcccatcaaaatttaaaaatacataccgccattggatggagaacatcaaagattggtgtatcagccgtcaattatggtggggacaccgaattccggcttggtatcttccgaaaggtggatacgttgtggccaacaatgaaaccgaagccttacagctagctcgtgaaaaaagcggtaataaagacttacagttagctgatttacgtcaagatgaagattgtcttgatacttggttctcttcttggttatggccaatatctctgtttgacggaatcaacaatcccggaaacccagaaataaactactattaccccaccaatgatttagtaaccggtccggatattatcttcttttgggtagcccgcatgattatggccggctatgaatatcaaggtaaaatgccatttaaaaatgtctacttcacaggtattgtacgcgacaagctaggacgcaaaatgtcaaaatcattaggaaattctcctgacccacttgatttgattgacaaatatggtgctgacggagtacgtgtcggaatgttactttgtgcccctgccggaggagacctcttatttgacgaaagtcttccggaacaagggcgtaactttaccaccaaaatgtggaatgccttcaagttagttaaatcttgggagattgcagacattgaacaaccggaacattcacgccttgccttagcttggttcaacaatctgctaaataaagtaacagaaacattaaatacccaattcgatcaatatcgcatatcagaagctctaatgaccatttacacaaccttccgtgatgaattctcatcttggctgctggaaatgatcaagccagcttacggccaacctatagaccgtcagagctatgagcagactgtatgtatattcgagcaattattacaactgcttcacccgttcatgccatttattactgaagatatttggcaagctcttcggacacgcaaagatggtgaaagcatcatgatttcaatcatgccccaacctgccgaatacgatgagaacctactttctcgatttgaagctgtaaaaaatgtcattgtaggaatccgcaacatccggaaacaagacaatgtaccttttaaagatgcactagaactgaaagtaaaagttagtgagcgatatcccgcaagctttgctagcatcatctgcaaaatgggtaatatttcaactatcgaaactgtaacagaagcagtaaaaggagcccgcagtttcattgccgataccgtagaatatttcattccggcatctggtcaggtcgacaccgtagaattgcgcgccaaattagaagaagatttaaaatacacccaaggctttttagcttcagtcatgaaaaaactcagcaacgagaagtttgttaatggggctccagcccaagttgttgctaacgaacgcaaaaagcaagccgatgcagaagctaagattgctgcaatcgaagcacaattgaaagagctgtaaaacattgaagtgtaatagtcagtacttatcctggctattacactcttttaaatgtcttccatagaaaacactttccatcaatagctgacagaaaaacatatctagccatagcataatgaaccatacgcccctattagcaaaatatagaacgttttttctttatcatatacaagtttatgttcagctaacattctttcaacactatcgtagcaaaaggggataatatcataatgctatccacaaaaccataaagtagctccttagcattcccgaatattttattcatatgaatatacgtagattcgcagtcaatctatcgaccaaattgacaccaccaaactgcaagccaaatagaagaaaacttaaaatactccttttgataataaaagaatcccgcttaaaagcgggattcttcatcttgagaaatttattgagccaaaaccttttgcacacatttttccaactcttcccctctcaagccttcacctacaattcgattattctcatccaatacaaacaacattggaacaccatgaatctggtaaacatccgtgactatgctattccaacctttcaaatcagacatatgcaaccaagacaatccatcagcttcaatagctttacgccaagcatcaactttgacatctaacgaaacacctataatctccaaacctttcgatttatatttttcatagactttcttgacattcggattttcagctctacacgggccacaccacgaagcccaaaaatcaatgattttcgctttagctttcactccataaatagaaagaggttttccatctggagtctgcatttgcaaatcaggtgcaataccaccaacaataagcgcagctatcttctctgcataaggtttcacataacatcctggaattgttgctttagccttttttcccaacaaatcatatttctttgacaaattctttttctccatcaaacgatccttccgccatgcaagcaaactagcactcacaatattatcatttgccttcaaaaattcatcttccgcttcatcataaaggtcttcatattgcattaataaaccttttatctgcaatattccaaaataatcatccttaccatatgatttctcatattctttacgtatggaatcacgttcatgctgcaacataagctctttttttctaaattcattgcgaagctcctgcattttacctccacctaacacttcatacgacttaggctgcttaacatctgctctcacgtcataatctcctttctccagaaaaacaggaaaacgcaaacatgtattgacagcgcaaatctcagccgcagtaggctgctttacctttccagtaaaacaaaacttcccatctgcagtaagtgaatttcctaaagtatcatatttgccagtaacatcttgcacaagcaataaaatacgcccaccatgattttttatctctccattgattttaaactgaccgaatacctgtagtcctataagtagcaaccctaccaatatcactaaatttttcataccctattttttaatttatttttttctctctttataaacaatatccacaattttccccaacttcttaaactcttttttcttaaccaaatcacccattaaatttgggacatcatacaaacgcataattccacattcattctctgctgtgtccagatcatgtgtacctacaaccaattgataattacgagctcgttcccaatcttcataggcttcccaagcaacaaaaggattaaatctaagcacctttatactttctcctggaaaatccaacactttttttgctggagtatcaggatgccccatatcaaattgataaactgtttgcccatcggaataaaacaaataaggaagagagtgatgacaagcaaacatagttgccttatctaaacctgttccagttaccttcccataatattcctgaacattatattcttcatactcaccttcttcccaccaattttccggttcttcataatgtgctctcaatttcatcccacaaaagaaaaattcttgtgtcacggtattttttaatatagcataaattaatccggattttgttgactccatgtgtacaagatcacagcctgtctttactggaaatttctgttctcctgagaaagtcataactgaagggtatgtagaattatttctaatcaccaaaaattgctggtgggtttcgtcatacagcactgcaggagcgcacccatagccaccattactataattatcatcaaaacttacaccaacaaaaggtgcggctttaaaatcaattttaccatcaattttattaatcggatattcaaaaacactaccaaaaacagacttatcaataccataaacatcttgtttgtcatcaacaactacccaacggtcattcacagaaaacattgacaaatttgcagcaactaaatgaaccgcatctggagtaataccaaatcgccacttcaaactattatcttcaccggcccgtaaatcttctggatccatcacgtaagtatctttatctgtcactaacataggaaatacttctctcacatcataattatatatcaaacgctgcggaaatccaggcttaaatgattcattctcccaaatattatgagctattaagtcttcattttcacttgaattaaacacaatatccatgcgagactctccattttcttcacacaataccatccaaccttcactagtcatggatttcactcgcaaataaaaaggtgtcgcccaacaaacgccagtttctttatcagttacattaaaaaaacatgaatagtctcctggttttaatgtcaacaatatatcaatacggcgttctgttgatagtactaaactatcagccttttctatatcttcgaaatctacacctttaggtattgctttccattcgtactcataatcagcctcattaaaatcctttaaggtcgattctatcacagggtcaaatgtaaggttatcaacgaaagaaactttagtatacaacttcccttgctccaaaccttctgcaattgccaattcatttatttcatggtagacataattacccttatcctctgcgcatgcccctaataatagcacactcaacaatattaatatgtatctaaatttcataacatcaaacatttaatcatttaacctttagaagcctcgcccatttccattggtttatcatcctcgtctatttgaggatgatcctgcaaccagcgatgcatatattttcctacaaacttcaaatatccttcagtcaactttgtatccacaaaatcttcccgatcgatacccatcacatcacatatcaatgctgattttttctgagaccaaactccgaaatattttataccatacaaattccaccatgccggcatcggaaaattctcattcatgacaatcacacgctggtaatcgatattccgcattttaaaattcacgctatcaattgggacagaggcttcacgactataaataaactgaagttctggattttcaatcaatttcaccacaaaacgcttcggatgttttactaaatcctccgtacgcaataactctatatcaataaaagcctcagcttgattggcaggaattacatactcagtatcaaacgctttaaagtcaacgccttcgattgcggataaagtatctgtgtccgaatacacttcaatattaaatttacggtcataatcagcagtattgccatacagacagacctttaattgaatagactgattttttacatccgaatttttcaacccccatgccacccttagcgtatcagaaaacaatcctccatctgcaaaataaatcccactatcaccttcgtaggtgtcaatctctttttcgcatgacacacaaccgaccaatatcaataataaaaacaataaattcttcataataaatacattttagttatactgactttctgcatcaggaatcggaagcacataatttgacaatttcacagacaccgtaccatactggtctgtagcagattgcatttctgtttttttattgcgtttataccaaaagaacaactgtccttctccataaaactcttttttccactccttctccaaatagtaatcaacatcccgttcacgaacattcgccaaattacgatgatttctaaaggtattgaaatatccaagacgtgtcggtccgtctgttgaagtctctgcagcaatcatatacatttcactaattcgaatcatcggtatcatttgattgtacagagaatctgtaccttggaatttattaaacacgcgataagtcgtgccagaaatctccacggttccattaagagaacttgaatagcgataatctgttttatcagactcaaatacatagtcaacgacatctccacgcggtgccaacaaagaattaagtttcaaattagaaccatcaaacaacgaggtatataatgtatttctgtccaaattttgcaaggcaaacataatttcggtagaaaacacacaatcagcactttttgaattattcaatttcatcggagtaatccatgggaatttttcctcctgtattttaataacagattctgcataataaagtgctctctcattattacccatatacaaataagcacgagccaacaaaccttgcactgcataataatttaatcgcaaatttctatcctgcaaaaagacatctttagagtttcccttcactccaaactctataatcggatcatttaccaacaattgctctgcttccaataaatctgctataaccatattcataaaatcatttgcagcataagaaggagctacatcaaactgaaattctttataataaggaattgagattgccgttgaatcttctgcatatacaggaccaaacaaacggaacaaatcaaaatgcagtaatgctctcaatgccaaagcctcacctttaactaaattataatactctccgacaagtacgtcacgatgctgctcaacatttttcagaataagattagtattggctatcaatttgtaagctgtaccccaaatacttgttgatttacccctgcctgcagaaccattatatgaaaactccatcaactctttattactcttattttcatctccaacagcataccgctgagctaaaatttctataaattcacaagaaagattttttccatacaaatcaggattatttaattcaatgtaaactccattcaaagcttttttaaatcccaccaagtcagaaaaattattctcttctgaaattcgatcgcttggttttatatctagccaatttgaacaggaaaaattaattcctaccaaaaggcatacaaaaattattaaatactttttcatacacaatccaatttaaaaattaacagaaatggacattgaaacactccttgcaaatggataactaattcctcgctcatctttaatagttgaaaatcggcaaatatcattcatataggcacttaccgttaatccagaaaatctaatacgctccatccatctttgtggaaactcgtaagctaaacgcacagattcaatagcaatatagttattatcttgtacgaatcgcgaagatattggagttatatctgtctgagaaatgcccttaaatttagctttgtcaccaggtttttgccaacgatcatacaatgctcgtttatcttgattctgcgacaatccggttgctgaaatattctctactttttcatatagcgtgttattgaatttttgtcctcccaaactataacgaatgtgcaaattcaaagaaaatcctttccaatataatgaattactccaaacgccttctacatctggattcgtattacctactaccacctcattatcataattatgctggaaggtcggcttaccatcttttgtcaagaatatctccttaccggttgccgggtcaatacctgctgaacgtacagcccacaatgccgtaggacttcctccatcataataacgagtcaaattctttgatatattttctttgttatattgatttaattttctaccaatcttatcataatacgttttaacatttctgaaagaaaggctcattgtccaatttatacgttcttgtgggcggtaaatgattgcatagcgaactgttccattgacacctttgttcacctgtttaccgatattgctaagacgtgatgacattccgacagacgatggaattccgatagaagccaataatggatcagtattcttatggaaataatcaaaattaatatggaaacgactccagatacttaaatcgaaacctacgttaatatctcttgttttctgccactgcaaatccggatctccaaaagtactaactaacaatcctgttccgaaattattctgcatccaattattatactgataggttgtgattgtattatacgaaccaaaattctggttaccaggattaccaatagatgtacgaactttcaacatatcgaatacatctgtattatccttaataaaatcttcattatgaatattccaagctacccccacggcccatgtcgtagtaaactttttattagagccgaatactgaagtaccgtccattctaacgttcgcatccaacaaatatttattcttataagaataacctccattaaaataaaagttcgcagaacgatttttagagtcgccataggaaggttttccattatcagggtactcattagaaaaaccaggagtcgtaaaattcccttctggaaaaccaacagcagagaatcctttggaaatactctttctctcactgattgatactcccaatactgcattaatctggtgtgcatcattaaatatttgcccataagtcaaagtcaaatcaccatcataagaaaactcatcttctctcatatcattataagaacctttcttcaacaattcaacttggtcgaattccgtcgcgtcaggagaagtgaatttttcagaatcagatgtttgtttggaaacaccaaaacgacctcttacatacaaataatcaaatggacgatattccaaattaaagttattacgaacaccaaacatttcacttctatcgtaactattcaatgctgcattccacaatggattaccaacaatctctgaagcatctgtagcactatattcattatccttatattctaaccatttttcgacagcaccatcagcagtccttttaggatagtatggatttgcatgtgcatactctgaaaaaggaacaacaggattatcatgcttcgtaacatccacacttagtttattcgaaaatgtcaactttccgacacgatacaacaagtctagatttccactaaaaatatcacgagttgaagatttcattacaccttggattttgttatagctacctccaaatccataacgaaactgctcattacctccttctacatagagattatgacgctgattaaaacctgtacgaataggctctgaaagccaatatgtatccactcctctcaatacattacccaacaatttattatagcgaacttctttcaattcttgattatccgcaatattcgatttaaaatttccagccaaacgctcaaattccaacttttctgcagcattcatcaaattataatcagtcaaatctgcaaaagatatctcaaaactaccattatatgataaacgcaatctaccaccttgagggaccttagtttcaacaacaaccacgccatttgcagccttagcaccataaattgctgttgaagcagcatccttcaaaatagtcactgatgcaattctatccatactcaaatccatgatagtacgtaaagttgtttcaaaaccatccaaaataaacaaaggctggttcgggtcttctccaaattgctcctttaatccaacgatactacttttacctcgaatttccaaatccggtaatcggttagggtcagaaccaaattcattactttccaatacagcaaaagcagggtccaacaccttcaaactctgaattaggttctgatttcctacactcttcaattcctctgctttataagtttgggaagatcctgtaaaactctccttttttcgagtatatacacctgtaacaacaacctcatccatttttgacgattcagtttccaacaacacctctaattgttctcgcttgcctaccgtcacttcgacagtctcataaccaataaaagaaacttctaaagcaattaagttatcagcaactgtcaactcaaatttaccatccatattagtcgctgttcctaccgatgtaccttttattttaatcgttgctccaggcaatggatctcctgtcgatttatctcttacaataccttttattgtcctagatttaatcttttggtcatccaatctagcagactcgccacgaacaataataacttcatctcgaaattcaaaccctaagttttttccctttaacaaatcatgcaaaaagtctttcaaagccaccatttttgcattaacatctacagtacccttattttgtaccaaatcataattgtacaaaaaatcatagccggtttgcttcgtaatttcattaaaaacttttaccaaagatgcatccttcatctttaagctaactagtccattttgagaatagacttcggcagaaacagaaagcgcccctaatactagcaaacaaaacaaataattcatacgcaaaaacaatttacgcaaccatattctttctcttgatatggcattctttaataatctttttttcatatatttgtattgatataattaaacgttgcctcaaaggcttgtcggcttatatgaggcatcacttctcaaccgaaaatacctccctatttccggttttttctaatacttacaattattgtccgctctttaatttcaaaatctacatcattagttagttttatcattgttaataaattatcaatatcttcatatcttttcaagcgtcctgaaaaacgtattttttctgctgcagaatctagaaaatccacatgaatatcgtaccagcgttctaaagttctcattatttctcctaaagattgtttatcgaaagcataatatccatccttccaagatgtataaagattcgtattcactttttgcacttcaatctctgctacaccttttttgcagacagcctgttctgccggagtcaaaatacaacccacaccctcttcattcactacctgcacagaaccatttaccaatgttgtcaatacctcatcttctccttgtactgctgcaatattaaactcagttcccaatgccgtcacatccactccattcacacatacaacaaacggacgtttggaatcttttgcgacatcaaaataagcctctcctttcagaaagattctacgctcatcgtctccaaaggcaatcggaaaacgcaactccgtctcagcatttaaccaaacattcgtgccatcttccaatttcaactgatactcgccaccacgcggaattgtcaaggtattatattccaactttttttctccaatcctctttacacctgccttatattcaagcacatttcccacattgcgaattctgctgctatccttgcttacaaattgtccttcttcttgcaaatccaacttttcgccggaagccaatgtcaacattgccttcggtgagccgggaacaatctgcgattctacaagctctacttttacagcctgctcattatctttttctgtcaacaacaacgcccctattccaacagccaacacaacaactgctgcatatccccaacgtacaatctgccgacgaagctttatcattttacctgcttttcttcttgcacaattatccttccaagcattttcaacatttatgctacttttaaaaccgcctttattctctgtataaaaaatctgcaacctggtgtattcatctcggttctgctgattttcatccaaccaagcttgcaacacatttatctcttctgacgataattcttcgccatgaattgaagcagctataatttcccaaattctattttccattcccactaattttggttttctattataatgacaccaaattcaaaaaataatgtgacaaaaaaatgagcaaaatgagcaaaatgagctagaaaagtaaataatttgcatatttctattttttttgcgaacattgcaacagagttgtatacaccaaaagatgaaagaagagcaaattattctaaaaggattgcagcaaggaagtgaacaagcatacaaagacttgtttacagcctatttctccgacatggtgctttatgcaaatcactatataaaagatcaagcagcagcagaagatatcgttcaggatttttttatcaccttgtggtttgaaaaaaaatttttcaatattgaaagtggcttagaaggttacctctatcgctccctacacaatacatgcctgaaccatctgcgcaatgaacaaaggaaacaagaaaagcttctgcacatgccaatggaaaaaaactcttccccaactctaacaattgaattggaagataaggaacgtgaatacaaacaactataccaagctctacataaactcccggaacaatgcaaacaagtgttcaccctctgctgtctacaagatatgaaataccaagaagccgccgactatttgggtatctctatcaataccgtacgcacccaaatgggaagagcttacaaaatcctacgcaattcgttggatagcaaagcatttcttaatctactattcttgagattcttaaaataggtattggcgcaattaccattttctcaaaaataaactacctttgcacaaataaataacaaaaatgaaactggtcatattaacaggagccggcatgagtgcggaaagcggcatcaagactttccgcgacagcgatggtctttgggaaaactaccgcattgaagatgtatgtacgcccgaagcgctagcaagcaacccggagtttgtgaataagttttacaacgaacgtcgcaaacaattgtatgaagcacagcccaatcccggacacaaagggttggctgagttagagcaatatttcgatgtgcaaattatcactcaaaatatcgacgacctacacgagcgtgcagggagccaccatgtattacatctgcacggagaattaaaaaaagtacgtagcagcaggaatcccgatgcaatctacgacttggacggctgggaactcaaaccaggcacccgttgcgaagacggctcattattacggccacatgtcgtatttttcggagaatcagtacccaatatccagccggcaacagaaatagtaaaacaagcagatatctttgtcattatcgggacctcgcttgttgtctatccggctgccagcctgctgcattatgccccggacaatatccctgtatttgtcattgaccccaacatccctgcagaagcacgtcgacgcggctttcacctcataaaaaaaggagcgtcagccggagttgaagaactaaaaaaactattattatggcaagaggtaaaaaaccattattagagaacgtaaaaattgaaaagattgccgcagaaggcaaatccatcgcatatattgatgacaaagtattgtttgtgcctaatacggtaccgggagacgttgtagatgttcaggtaacacggaaaaggaaaagcttcatggaaggctttgttacacaagtacgacaattgtccgacttgcgcaccacaccggcctgctctcatttcggtatatgcggaggctgtaaatggcagaatttaccatacgaaaaacagctggcattcaaacagcaggaaatcattgacaatttacaacgaatcggcaaggtcgaattacatggtatccgccccattatcggttcggctcaacagctttattaccgtaacaaactggaattcaccttttcgagcaaacgctttttgacccgcgaagaaatcggctctgatgcagatatcgaaaggacaccagctctcggttttcacgttccgggtctatttgacaaagtggttgatattgaccattgctatctacaaggcgaaccttcaaatgagattcgcaactttatcaaggcacatgccttaaaagaaggattgagtttttacaatatccgcgaacaaaatggtttcttacgaacattaatcatccgaaccgcttcaaccggagaaatcatggtaaccatcgcgttcggacacgaaaacgttacagcccgcgaaagattactaaatgctctagtggaaaaatttccacaaatcacctcgttaatgtatgtaatcaacgaaaagctgaatgatacattaacagaccaggatattatatgctattacggatgtgaccatatttttgaacagatggaagatctgaaattcaaaatcggtcccaaatctttctaccaaacgaattctgaacaagcatataatctatatagccaaacccgtacactggctggcctgacaggaaatgaaatcgtatatgacctatataccggcacaggaaccattgccaactttgtcgcacgtaatgcagccaaggtcatcggagtggaatatgtaccggaagccatcgaagatgcccgtgtcaactcatccatcaatggcattacaaatacggtattttatgcaggagatatgaaagacgtactgaatgcggagtttattgaacagcacggacgtcctgatatcatcattacagaccctcctcgcgccggtatgcatccggatgttgttcagacaatcttaaatgcagcacccaagcgtattgtatacgtcagttgtaattcagccactcaagcacgagatctgcaacttcttgacgttgcttacaaagtgtgtgccgtacagccagtggatatgtttccacacacacaccatgttgaaaatattgtattattggaaatgaaataacaaaaggcggcattgataatgccgcctttctctatatttccatgcatactactgagctgtagatgcagctttttctaatttaaagcccaacaacaatccgtcataattactaatcaatctctccacggttgcccctgcagcactcaccttggaggccatacgagttaatgctgtcaacacggacatcaacttatctgcattgaaaagcaggctcatcgatgttcctgtcactgcgacttgagcagtctgagtaacacctaaacgacttgtcatggtaattgtcttggtctccggattaaatgaatatgtaccctgagtagttctttttttcattgtaaaagtataagtactgtccgcattgaaggtatagctgcaagcatccatccccaattttttaaacaccctgtctaattcttcttctaccttccctgcaatagcctcacctccggctttagccaacaattgatctgcctttaagctacaatccggactcacataattccaagtccctatcaatgactggcttgttgtcaacttatcaccaataacattttttgctacattacctaataatgatttccaatcctgcgacattgcattcatcgaaaacacacaactaaaaaatacgaataacaaaatacatttcttcaacataacttcactaattaaggatttcacgcaaaattaataaagaatcctacaaaacataacaaaaaaccccttggaatatatccaaagggctctgatgcttttcctgcaaatatcatattggaaattaatagcaagataaatcataaaaatcattaactttccgattttccggcaattgattcaaaccatttgatacagacttaacagtccacggagcaattgcaaataatccactgtcactcttctgctctacgcctgttgaattctttttatactccttccaaagtaattttacgggaaccgatgttgcattgtctgacaaaatagaggtcaaatcaaaagaaacatttccggcattccatacataattctgcccccatacactctcccccgctgccggttggtctttgtatgcattatgacgcaatgccaaatatacggtatcattatgggattgtacatcatccataactacatttataaaatgcttttcctgtgaattctttttcaccggcacagcaaattcaacattcaaatactttccaccaaaccatgcaccaacaacagtgatcggatcgttaccaatactatcttgacgatgcgcctcgttagctgcaataaaagattgttttaccggttgtttggtcaaaacatcctgataaccataaagacggacataataattcatataaccttccaacccttcagtatcccgtacactctcgataatagaatatctcacatacatacggatgccctctttaaaatccttaccttcaattttcaatccctctactgcaatcaatctgctaccgtcatccctacgaatagcccaatctccaactttatcaccctcgattttctccaggctaccatagctcacccaagtatcaccattcaccacataatactcatcatcatcattatcacatgccgtaaaaaaagctgccataatagacaatagcacaaacattttcaaaattcctattttcatcgttgctttcaatttaaattacattgataagatgaaagtttccgcacaaagttgcgtcaaaaatgatacatataacatatttttgcaaaaaaacgcaaacatgctacagaatattcttttagtcggtttaggctctatggcaggaggagtagcccggtatctcttatcaatgtggattaaacaaatattgccctcactctttccatggggaacatttattgtcaacatgtccggctgtctgattatcggactactcagcggatggctttccagtcaaccattacttccaattcaccacagattgctttttattataggtttttgtggcagctttacgacattttccacctttacaatggataatttaaacctgttaacaaccaaaacctatggattatttttcttaaacatcagtgccagtattgtcctaggattattatgtactgccatcggtttttggctgacacgacgttagtatcaaaacatttgttaattttgtatctgacagtgaatactggcactttagttgctactataaaataaaactaataataacataatggactttgaactgattgataaaactgctgacacacaatttaaagaacttgaacgaagaatctggcgtttacaaagcggaggaacaattgatagccttaaaacaataggagctgaaaccagccatcaaattggagctagctttgtttcgttgaaacaattagcaacacgctacactcccaatgaacaattggctaaactactatggaatacaggaaaacgcgaacaacaaatcatagcttgttttcttttacccacggacataaataaagaaaaaattacgcaattgtttcataattgtttaaatatggaagttgcaggttatctcggttctgtttatctatataaacatcctcatttagtggagctagccgaggaacttcttagctcaggacttgccttgcaacaagtagcaagtcttaccgcattggcaaaacatctcattataaacaaaaaaaacagtcttttcagcaaggaatactttgccgaaattcttaacagagaatataatgacaaatttgtacgcctaactgccgaacgctatcgttttaatctctaattaatgttaaacgcaagctattaaatacgacaaagctattttaatctgaaatctttgctacctttgtcagtataattacagaaaaaaagtattaatagataatttcataaatttactactatgtcaaaattagatttaagcaagtatggtattacggatgtgaaagaaattcttcacaatccatcttacgatgtattatatgctgatgagaccaaagctggtctggaaggctacgaaaaaggtcaagttacagaattaggtgcagtgaacgtaatgacaggtatttataccggacgctctcctaaagacaaattcttcgtaatgaacgaggcaagcaaggataccgtatggtggacatctgacgaatacaaaaacgacaacaaaccttgtaccgaagaagcatgggcagacttaaaagcaaaagcggtaaaagaattaagcggtaaacgtctgtatgttgttgacacattctgtggtgcaaatgctgctacacgcttgaaagttcgctttatcatggaagttgcatggcaggctcactttgtaaccaacatgtttatccgtcctactgctgaagagttagcaaactatggagaacccgatttcgtatcattcaacgcagctaaagcaaaagttgacaactacaaagaattgggattaaactcagagacagcaactgtattcaacttaaaaaccaacgaacaggtaatcctgaatacttggtatggcggtgaaatgaaaaaaggtattttctccatcatgaactacctgaatccgttgcgcggcattgcctctatgcactgttctgctaacactaatatggaaggtacagactctgccattttcttcggattgtcaggaactggtaaaacaacattatcaactgacccgaaacgtaagttgattggtgacgacgaacatggttgggatgacgaaggagtattcaactatgaaggtggttgctacgcaaaagttatcaatttggacaaagaaagcgaaccggatatctataatgccatcaaacgcgatgcattattagagaatgtaacagttgatgcaaatggtaaaattgattttacagataagagcgtaaccgaaaatacccgtgtttcttatcctatttaccatattgaaaacattgtaaaacctatttctaaaggaccgcatgctcaccaagtaatcttcttgtcagcagacgcatttggagtattgcctccagtatctattttaactcctgagcaagctcaatattacttcttgtctggatttactgcaaaattagcaggaacagaacgtggtatcacagagcctacaccgaccttctctgcttgtttcggagcagcattcttaagtttgcacccgacaaaatatgcagaagaattggttaagaaaatggagaaagtaggtgcaaaagcttacttggttaataccggttggaacggaacaggaaaacgtatttctattaaagatacacgtggtatcattgatgccatcctggatggttccattgataaagcaccgaccaaaaacattcctttcttcgatttcaaagttccaacagaattaccgggagttgatccgaagattcttgacccacgcgacacttatgattgcgcttgcaaatgggaagagaaagcaaaagatttggcaggccgtttcatcaagaacttcgacaagtttacaggaaacgaagctggcaaagcattggttgaagcaggaccgaaactctaattataaaaccttccgaataatcggaaggtttttttgtgcaataataaatccgagtagaaatctactcggatttatttattatactaaaagaaatactatccaaagtatcctttcattataccccgtttgctgttacgcacaaacagtataatttcatcacgctctttcgatgccggcatttctgcttctattctttctatagcatcagagaaattcaaaccagactggtaaaggatacgataaatatcctgaatttcattgattttctcgttagagaactcacgacggcgcaaaccaatagaatttacacctgcataagacaaaggaaggcgtcctgcttttacatagggaggaacatctttaccaataagcgatccaccctgaatcatggcatgtttaccgatatgcacaaactggtgtactgcagtcatacctcctagaatagcaaaatcctcaacaacaacctctcctgctaactggcatgcatttgtgatgatgcaattattaccaatcgaacagtcatgagcaatatgtgcatacgccataatcaaacagttgctaccaacttctgttattcctctcgcagctgtacctctattcacagtggcacattcacgaatagtcgtattatcaccaatcttaacaattgatttctcacctctaaatttcaaatcctgtggcacagcggaaatcaccgctcctggaaaaatcttacaatttttaccaatatgtgcaccttccataatagttacattcgatccaatgcgcgtaccttcctcaatcaccacatttttatcaattgttacaaaaggttcaatcactacattatcagcaatttgcgcttctggatgaacataggctaacggttgtttcattcgttttttatttaatgaataactaagtgtgtctgaataaattcagtttgcaaatataagtattagttttttgtttttgcgacttgagccataaattctccttcgcatactaattttttaccaacataggcatatcctttcatctgaacaataccacgtttgataggtgctgtcgtaatcagtttgaataccaaagtatctccaggaacaactttattacggaatttcacgccatcaatcttcatgaagtaggtagaataattctccggatcaggaacactattcaaaaccaaaatacctccacattgcgacattgcttctaccattaagacaccaggcatcaccggttcttcagggaagtgtccaacaaaatgaggctcattcattgtaacatttttacatccgataaccatgttgtctgtcaatcggaaaatcttatcaactaacaagaatggaggacggtgcggaagcaacgaacggattttattaatgtccatcaatggagtttctgttataacgtccaaatctgcaggataagcatcttcacgttcttcggctacaatttccttgtaaagcattttcaccatagaagcattagccttatgtcccggacgttctgcaattacacgtccttttataaaacgtccacacaatgcaagatctcctattacatccaacattttgtgacgggcaggctcattatcaaaatataattcaagattattgaggatgccctctttcacctgaatattatcataaccgaacaacttagctaaatgatctatttcactctgctccattttgcgatcgacaatgactatagcattgctcaaatccccacctttaatcaatccactagccaacaaagcctcagcatcacgcaaaaatacaaaagtacgagaaggggctacttctttggcgaaatccgtctgaccttcaacataagatgcatactgcattgtaagataaggtgaatcatacgcaacgactgtatttacggcatattcagaatccggaaccactgttatacgagtttttccatcttcactgcaaaattccatccgtttttttactgtaaaatagcgacgttcagcctcttgttcctgtaatcctattttttcaatcgcttcgatataatagcgggcacttccatccaatatcgggaattcatcgccattcaattcaatacggcaattatcaataccgcaaccatacaacgcagccattgcatgctccagagtcatcacccgtgccccatctttctgtaggcaactggcacgatctgcaaattcaacatattttgctaaagccggaatctccggagctccttccaaatcggtacgtacaattacataacctgtgttcacctctgccggtttaaatactgcacatacttcttttcctgtatgcagtccctttccgctcaaagtaaactcaccattcagtgtcttctgttttactgtcattattgttttgcctttattgtttgtatttctttttccaaatcacgcaactgtccgtataattccggtaatttacggaataacacataacatttacgatattttcccacctcaaaggcaggagctcccataaacacagaacccgcagcaatatcattagataccccactctgtgctgccaacatggtatgatcttcgattttcaaatgaccggcaattcctacctgacctccaaacatacaatgagcgcctacttttgttgttcccgcaacaccacattgagctgccattacggtattttcacctaccaccacattgtgtgcaatctgcaccaaattatccaatttcactcctttctgaattcgagtagaacccattgttgcacggtcgatacaagtatttccaccgatttccacgtaatcttctataactacattaccaacctgtgccactttattataatcctctcctgcaggagcaaatccaaaaccatcagctccaatcactgtaccggcatgaatggtgcaattattgccaatgacacaaccgtaatacacctttactcctgcgtataacgttgtgttatctcctatcctcacaccttcgccaatatatacttggggataaatttttacattattgccaattttagcccctttaccaatataggcaaaggctccaatatagggattttcacccatctgcactccatcagctatgaatgaaggctgctcaatgccttgcggtttgggttttatcatctcttcgtacatccgcaacaaagcagcaatcgcctcataggcagagggtacacgaatcatcgtacacggcacaggctgtgacggcacaaaactattatttactaacactactgatgcacctgtagtgtaaatataatgctcatatttcggattagccaagaaagccaatgtttccggctttccttcttcaatcttggaaacgtttcttaccagcacctctccatctccctctaccgtaccttgtaaaagtgctgcaatatcttttgctttaaattccatggtatcaaaaatttcggcaaatttaaactttttattttgaaacatgaaaatattacgaagatgtttcggttttcttccaaagaaaacgaaggtgtctctaatcaaaacaccttcattagaaatggtaaaacccattccaagctttagtttagctcacaaaacactcacattaaaaacaatcggttaaaccctactgcttaacgattcaaatttaccacattatttttaccaaacattatactttttggtatttttatctattaatttcatccactttcgacaccatcgaatcacccctaacgcttcggagcttcacccacacccataacaggatcgctaatcttttgataccaataatattccggaaaatcttttctaaggacaatataagaactatccagaagattcagtcttatttcataatccgtgccggttttcaatttttcattgtcacgccgtgttacccaagtcatatattcataaatgttttcagacactctcacatctgcaccgcatggcacacccagacatagagtatcaccactcatatatcgggtcctcatcaaacaccgattcccatctcccaaaggtatagatacatgcaattcgaatatttcatgcacatttttcccgggtatctgaataaacacagaatctttataaaaatctctccaaccggctgcacgcttatccgaattgttacaagatgccatagcaattacagcccagaaacaaataatcagttgactaactttcataacccattaattaaaatcctttacaacttaaaaaaatcacgattcgacctcatctacatttacacaaccaatattacgaaaaataaattaaaaaacaaacacttacacacaaattcaacatcccaattcacatttcccttgctccgaaccctcttccctccctatcaaatatatgttatctatatatcaaatataagataaacataagacaaagataacaatctgttatctttgatatatacttgtcaagtgtttgagttgaaaatacaggagactttagcaaaaggaaaaagataacagtccttttccaatacaagccttcgcaaagcctgcagacagtccccacagaatgtttgcaaatgaaattgtagaattggcatattttccgtacatttgactgcgaatataaaaatgaaaataccaagatatggcaacaataaaatcatcagaattaataaccaatccggatggaagtatttttcacctccatctgcatccggaagatttggcaaacgacattattctcgtcggtgacccgggacgggttgaaatgattgcatcacattttgacacaatagagttgaagaaaagcaatcgggagttttgcaccatcaccggtcgttacaaaggccatcgcatttctgtcgtatcaaccgggatcggtcccgacaatattgacattgtcgttaacgagcttgatgctcttgcaaatattgacttaaaaacaaaagaaatacgttctgaacaccgtaaactgaatctggtgcgtatcggaacgtcaggatctgttcaagcggacataccggttgactcattcgttatttctgaaaaaagcatcggatgcgatggagtgctccgtttttatgcaaacaatgaaagcatatgcgacgaaaaatttgaagatgccttcatcgaacactgtcaatggactccacaagctgcacgtccttatgttgtaacttctgctcctgaattagtagcacgcctacacgatagccaacatactttcaaaggagtaacattaactgctgtcggtttctatgggccacaaggacgtgtactacgtcttccgctagccatgccgaatatcaatgaccgaatcacagcttttcgctacaatgagtataaagtgaccaactatgaaatggaaagtgccgccatcacaggactcgccaatctgttaggtcaccatgcagcaacaatatgcctgataatcgccaaccgcatgaccggagatgcctcgtcagattatcacggatatatgaaaaaacttgtcagctacgtattagaaagactatcaacaaacacaacattataaagccaaatactataaaaaatgatacaaagaatacaatccatttttctattatgcacagccatcattgccggcttgatgtttttcatgcctgcagctaccattgtcgttcccggagaaggagtatatgagttttactccagttccgttaaaatgctaggtaatcaaccggagcattatatggcaacaaattggacatctctaatactaaacattttgataattgcattggcaattgtaaccatttttgcccgcaagcctaaagagaaaagcgtaaaaccgagtctgctgttacaacttcgtctatgctttgtaaacattgtattcatgttgggcatgattattttaatgtggttacaaatacgaagtgttgccaatgacattcaggcagaatggaatgtaaatacaggatttattttcccggttgtagggattgtcctgacgtggctggcaataagggggattataaaagatatcaccttgttaaagtcatacgaccgtgtgcgttaaaaacatagagaaacaacatgaaatattttataaaccaacttaataaattatgcgtaaaatctatttgatcttggctttgctgactattgccggaatagcaaaagtaacagcatgtaccaacttcctcttgacaagaggagccacaaaagacggctctaccatggtaacttattctgccgactcacacgttctgtacggagagttgtatcattggcctgccggcacttggcctgctggtacgatgatggatatttatgagtgggataccggcaaatatatgggcaaaattgcacaggcagcacaaacctataatgttgtcggcaatatgaacgagcaccaattggctattggagaaaccacttttggaggccgcccggaattggaaaaacagtcaggtgcaatcatggactatggcagccttatttacacaacacttcaacgcgcaaaaactgccagagaagcaattgttgtaatgacagacctggttgcacaatacggatatgccagctctggagaatcattctctattattgacccaaacgaagtatggattcttgaaatgatcggtaaaggagaaggagaaaaaggagccgtatgggttgcccgcatggtaccggacggatatgtttgtgcacacgcgaaccaagctcgtatcacaacattcccgatgagcggaaaaacatccatttcttcagacaaaatgaagaaaatttatgataaagaagtaaccacagtatattccaaagacgtaattgcttttgcaaaacaaaaaggattctacccacaggatggtaaaaacgctgatttcagtttttcagacacttatgctcctgtagatttcagtggtgctcgtgcatgcgaaattcgtgtgtgggcatttttcaatgctgtaaatccagacatggctcaatattgggattatgccaaaggaaaaatagagcgtgatgccaaaggctatgcaaccaatcgaatgccattgtgggtgaaaccaagccacaaattggatgtgctggaagtaatggacttcatgcgcgatcatttggaaggtacagaactggatatgagcaaagatccgggagcaggtccctatgaatgtccgtaccgctggcgtcctatgggctataccgtagatggtaaagaatatgtacacgagcgagctacagctacccaacaaaccggattcacctttgtagcacaatgccgcagttggttgcccaacgcagttggtggaatcatctggtttggtgttgatgatgcagcaagtactgtatattttcccatgtacagctgctcaacccgagtgccacattctttcgcagaaggcaatggcagcatgatggaatttacgaacgaagctgcattctgggtattcaaccaggtaacaaatcttgcatatacacgttacaatgctatccatccggaaatacgcgcaaaacaaaaagcattagaaactcagtatgtggaatatgtaaaattaattgataccggagcagccgatatgtacacaaaagatccggaaggcactgtgaagttcttgacagacttctcttgcaacaccggtgaccgtctgacagcagactggaggaatttctatggctatctattctgccgcttcatggatggcaatataaaaactgctgtaccgggagaaaagaatccgaaagttgaacaaccggctctaccggaatggtatttgcgcaccattatcgaaaaagccggagacaaattacaagtaattaaataaccacttataaagcaaattaattatggcaacagtaactttagcaggaaatgccttcaacgtaaatggggaattcctaaaagcaggtgcacaagctcctgatttcactttagtaaaaagcgatttgagcgaactgtctttgagcagcttaaaggggaagaaagttgtattaaacattttcccaagcttagacactgcagtatgtgcaacttctgtaagaaagtttaacgaaatggcagcaaaattgaacaacactgtcgtattggctatttcgaaggaccttccttttgcacacggacgtttttgcacaaccgaaggcattgaaaatgtaattgcattgtcagcattccgtaacaccacctttggagaaaattacggtgttgcattagcagaaggacctttagcaggcttatttgctcgcgccgttgtcgtattggatgaaaacggtaaagtaatctattcacaattagtaccggaaatcaccactgaaccggattacgaaagtgccttggctgcaatctaaagtttatggtaaatattcattttgaatatttttcattgctgcgaataaattgccgcgcacatgaggcgacaaagcctccatctgatctataatcgatgcaattgcatgacgatttgtggcttgctcgtaagggcaagcctttttttgttgcttgaaatttctaaatttcgcatattgcattgtctctttattagtgatataaattaacggccgtatcaaagtgaaagtattgtcgaacatggctaatcgcggaggcatgctcgcaatcgtaccattaaacatcatactcatcaacaaactttcaatggcatcatcccgatgatgtccaagagccaatttattacaatgctgctccttggcaatctcaaagagcatcttgcgtcgattccaagaacaaacgaaacaagcaggcttaccggattcttcccttaccgtggcacatattgtccgcgatatcaacggcacccccaacttatcacaaaaagcagcgatatattctgcatccacttcataagccacattttccacagcaatatgagctgccacgacggaataactctgcttaggatcccgtgccctaagaactagaacttccaataaagccaacgagtcttttcctccagatactcccaccaaaattcgatcacccggttctatcagattataatcatatattgccttaccggttttcctgaaaaattcacgcataaacagcttttcctgcttcttgtcgtccataataactattctatttaaggagggcaaatgtaatcatttttcacgctgaaatacacggatttcagatgtaacatttttgtaatatttctgtaacaaccaaataacaagaggtctgtaatattgcaaagtgaaattataatgcaaataaagatgaacaaattattaattttagtattggcaatctgcctcgcagcatgtggagactcaaaaaagaaaaatgctcaaggtgcaagtgatataacccttgcagcagcaggagctacattccctcttccctattataacctagcattcaaaaactataaagattctactggagtgtctatcacttatgggggcattggtagcggtggcggaatccgcagtttaaaagacaaaattgtagactttggcggaagcgatgcttatttaagtgatgcagaattagctgaaatgccagcagaagtggtccatataccaacatgtatgggagcggtcgtattggcttataatctaccggaagtaaaagaattaaaattaactccggacattgttgccgatatcttcttaggcaaaatcacccgttggaatgatagtcgtctacaagcagtgaatgaaggcattactcttccggacaaggccgttaaccctgtatatcgctctgatggtagtggaacaacctttgtattcagtgactacctgacaaaaataagcacagaatggagtgaaaaagtcggtaccggtaaatcattaaaatggccgacaggcttagcagcaaaaggaaatcctggagttgccggaacaatcagtcagactccgggtgccatcggctatattggttctgaatacgcctttgctttacagataccgacagcaaaactacaaaatcgtagcggtaattttatcaccccttcaacagagagtatttccgctgctgccaacgaaatcccagcagacacacggactatgataaccaatccagaagctgctgatgcttatcctatcagttgcttcacctggatcatcctctacaaagaacaggcatatggagagcggactgaaaaacaagccgaagcaacaattcaattattgaactggatgaccgaccctcaggcacaagaactaacaacacacgtccattattctcccctgccagcctcagctgtgacaaatgcaaaaaaactactgaaaagcatcacctataaaggacaaaacattttaaaataagactatacagtatcgctttaagcatctattgtcatgcgtgattttatattcaaacggctattgtttctctgttcgctactcgtattattgatatgcggaggcatggtattctcacttataaatggtgcgataccagcctttgaaacctttggcttcttcagctttatcagttctcctgaatgggatccgacagcgggcagtgaacactatggagctctatcgttcatcgtcgggaccgtcatgacatccttcttggctctacttatctgcattccgttttctttgccggtagccctcttcactggcgaatatttccgcggaacccgtgcagccaccatcatcggctcagtcatagacctattagccggaatcccttccatcgtttatggtttatgggggttctataccttgcgccccattttgatagacatgaatctatctgaacaaggatttggaattttaacctcctccattgtattggcaatcatgataattccttatgccgcatctcttagctcagaattcatctctatggttcctaaagaactgaaagaaggtgcttacagtttaggaggcactaggctggatgttgtccgcagggtcatattccccgtatcaggatcaggaatatttgccagctacatactagccttagggcgtgccttgggagaaacgatggctgtgactatgctaataggaaacaccaacaacctgccacattccttaacagcaactggtaacactatggcaagtgtcatcgccaatcaattcggcgaagcagatggcctaaaattaagttctttgattgctatcggtttactattatttctgattacagcagtcattaacttcatcggtaagatgattatgaaaaaactgagttaaagtatgaattacagaatattaaaagacagaattttcttttggacgatttgcgttctatcctcaatgactgctattccattaattgtaattatttgggaagttgtcaagaaaggatacagacaaatcaatctcagtttcttttcagaaacagcccccagcactctggatgccatgttggccaaaagcacaggagagctcatccccggaggtattgccaatggcattgccggtacattaataatggtgattatcgcagccattattgccattcctgtcggcattatgggcggcatttatttagcagagaaaccgaaagcaacattctctcatattgcccgctttctgacagatttattacaaggcaccccttccattgtcattggaatcattgcctatgcgtgggttgtaaaaccattgggcagttactccgcactggcaggtagtgttgctctagccataatgatgcttcctttaatcatacgttcaactgaagaaacactgaaaatgctacccggaagcctaaaagaagcaggccttgcccttggggcctcctacactagtgttgtactaaaaatattagttccatcagcattcggaggtctatttaccggtattttactagctatttctcgtgttatgggagagacagcaccattgatgcttacagctttgggtagcacagttgtaaattgggatgttactcatccgaccagcgctgtcccactactgatttgggaattctataacgatcctaatttaattgacatgatatggagctcatcgctatttttattaatgctgattctagtattaaacatcattgctaaaaagattgctcaaaaatggagaatcggataatagacaacaataaatgacagacgttaccatttgaattatgatagaaaatccaatactacaactaaaagacgtttgcatctcttacacccctggaaaaaacgcagttaatggagtgaatgcaaaaatcgaaaaaaacaatatcacggccatcatgggtccttcaggctgcggcaaaagcactttacttcgagccatcaaccgtatgcatgaactatacccggatattcagatcacaggcgaaattctattggacaatcaaaacatcttaaaaatgaatccaatggaagtcagacgaatggcaggaatggtatttcaacgccctaatccattccccacaatgagcatctacgacaacgtcatcgcaggatataaattgaacggtatccgtttatcaaaaaaagaaaaagatgaaattgttgagacatgtctaaccaatgtcggcctttggaacgaagtaaaagactctctttataaaaaagggaccttcctttctggtggacaacaacaacgcttatgcatagcccgcgccttagctctcaaaccggaagtcctgttaatggatgaaccaacctcagctctagaccccattgcaaccaatcggattgaagaactattacttgaattaaaaaaagaatttacgattgtgattgtcacgcacaatatgtctcaagccgcacgaatctctgattattccatgttcatgtatttaggagaattaatagagtacgaccagacacaaacaatgtttactacccccaaagacaagcgcacagaagaatatctgacaggacaattcggataacaaaaaaataattaaaaaataatatattatgagtggattacaagaaaaaatgctcagcagaataaccgccgactttcaagtattggccaaagttgttctccggcaacaagaaaatataaaacaactattagaaaacaacaaggacaatgccttatatactgaaatcaataacgatgaacacattattgacagtctggaagtaaagattcgaaacgaagtgattaatacgattgtgctctacagtcctcgagccacaaatctaaggatgatcatttcctattacgacatgactgcttatcttgaacgaattggagacttgatacttaacattgctaaatacttactaaaagtagatctacaaggggaagttttcgagatttataaaccaaaattcttaaaaatgctcgctttgacaggaaatatgacacaaaatgctatatttgctttcacatgtgcagatatacaactggcaagagaaaccattgaaatggaccaccaagtagaccaactgcaccatgctatctgtgacagtctacgttcgcaatattcagaaagaactctgacagcccaaaacatgacagatattctttctgtgaacggaatgtcatataacatggaacgtattggagacaatgccaccaacattgcagaagcagccatttatttggttgaaggtaaaaacatcaagcactgggacaaccccaataaagatgaggttctggaagccggcagtgaaggataacaaattaataaatgttctaagacctattaaaattcaaatccatggataaaaataaaatcttggtagtagacgacgaagaggacttgtgcgaaattctccaatttaacctggaaagtgaaggttttatagtggatatagccaattcggcggaagaagctttaaaaattcttcgggacgatcatgagttgatattattagatgtcatgatggaaggcatgtcaggcttcaaaatggctgaaaaagtcaggaaagaactccaccgtaatattccgattatctttcttacagctaaagatacggaaaatgatatgttgaccggattcagcataggaggagatgactatatttccaaaccattctccatcaaagaggtcaccgcccgtgtcaaagctgttttaaaacgtgtcggcagtcaagatattccagaacaaaaaaataccatagaaatcggagatttgactatagaccttaatggtaaaaatgtatttttaaaagaaaagcctattctattaaccaaaaaagaacttgaaattcttactatgctagccaaagctcccaatcgtattttttcaagagaagatatcctcggcaaagtatggcaagaagacggatatgtacttgaacgtaccgtcgatgtacacatcacccgccttcgtaaaaaattaggagactttggcaagcatatcgccaaccgttcaggatatggttattgtttagaaagctaaatctgtttcattatgcacctgacttataaaaaaaagatatttctctattttttgctggtattttcaatcttcaccatcatcattgttgctgtacaacaaaatagagaaaaaacatacaaagctgacagctttaaaacaggcatggaagcttattccaaagttattgcagggtatattcaatatcaccagcttttaactagtggacacattgactccctcaactatgtacttcctcttttacccaaagaactacgcgtcacaatcatcgaccgagatggctgcgtactatttgacaacgatgtagatagtatacacgaagtggaaaaccatcttgatagacctgaaattgtcaaatcacttagtaacggtaatggatccaatattcgccaatcagccactactggagcgaattatttctactatgcccgctttttctctccctattttgtccgtgttgccatgccatacgacagcagtgtacaaaatatactaaaagccgatgatatattcacttatttcatcctactgctatttttctcagcattagtttccttgctatacctggcagaccgatttgggaaagcagtcagcggcttgaatgatttcatacaatctgcagaaaatcaagttcctgattacgaccaaataaagtttccagagacagaattgggcgaaataggtaacaaaatcattgccaactataaaatgttggaagaaaataaaaaccaactgaagatggaaaaagaaaaaatcattcgccacttccatcattcagacgaaggaatctgtattttcgctgctgacaataaaaagatatatgccaatacgcactttatccaatatctgaataccatcagcgacgaaccaatttttgatgtcgattctatattttctcttccagaattcaaagaagtgaaaatatttttacaaaacaatacgcctgtcaatccgcaaggcaacagcatcccaatttggcaaggaaaaatcagcaaaaacggcaaacattttgcagtgaaattactgatatttaatgacaacagctatgaaatattacttaataacatctcctcatctgaaaaaaaccgcctactaaaacaagagatgaccaacaacatagcacatgaattaaaaacaccagtcagtagtatcagaggttacatcgaaaccattttagagcaaagcaatttgactcctgacaaacaaaaattctttttagaacgagcttacactcaagtattacgcctttccgaccttatccgagatgtagcgctaatcactaaaacagaagaggcttcagaattgttcaccaaagaaaatatcaacatttatgacacagtcaacgaggtgacaactgacttggaagttcctttaaaacatgccggaatcattttagaaaactgtgtttcgtcaaaagtagaaatcgaaggtaatcatacattgctctattctatattccgaaatctgattgacaacaccatcagctatgccggagacaatgtaactatccacatagaaacctacacagaagacagtgaatactactatttttcctactatgacacaggacgagggatagaagaggaacatcttacacgcattttcgatcgattctatcgggtcaacccaggacgaagtcgaaaaaatggaggttctggccttggattatctattgtcaaaaatgccatcctttttcacaaagggcaaatctcagcaaaaaaccggaaagacggaggattggaatttatcttctccctacgaaaaaaattatattaaagacatttattgacagttggttaatgtatctaaaaacattaaccaacttttattttattcacacagaaaaaacgcaaccttttttgtattattgcatctagattaatggaagtaacaagtaataaaaatggaaaaaaaattcagtttcacctttatcagcgccgctttattcatcttgggaataattacgttgaatgcttgcaataatgacaaagaggatgtttatgaaggttatggaatgatcaagtgcgaaaatggttcacaatattctattattttagatgatggacatactattatccctcaagaaggttttacccaattggaacgctttcgagacagcacaagagtacaatcgatatttacgattttaaacgaaactccttcatgcagccaagtcaacctcatcacactagatacaattctcacaaaagatgttctgccttatttacccaacactgatagtgccggacatgcaccggtaatgcttacaaatgcctggttagcacatggctttctaaactttgaatttgcatttgtaggagacaccaaacgacatatggtcaatctattacaacgctcagcaaaagatgagctattggaattcgaattccgccacaacgattttgatgacgaacgaaccaaaacaatgctaggaatcgtgtcatttcgtctacatcctattctcacaaaaatcgaaaaaaacacaaaaatcatcattcgatacaatgatacagatagcaccaccaaaattatcgaattgatttacaatataaaataaaatattttcataaaaaacagcgattttattttgctgctattataaaaaatcatacctttgcaatcgcaaaagaaaaaagaatagttctttaaagcatgggcagttaccagagtggccaaatggggctgactgtaactcagctggcgtagccttcggtggttcgaatccatcactgcccactcaactatttgcggaaatagctcagtcgatagagcactagccttccaagctgggggtcgcgggtttgagtcccgttttccgctcacaaaagcacctatcaaggtgctttttttatttacagtctcgcctaattctattttgaacaattctctaaattcactatctttgtcaattcatgcaaaatcctattatatgaaaagacatttcaaactacgttacttgtggttattgcctttattattatgtagtaatattccacctccagaaccaatctttcccataccgacacctgcacaaattgcatggcataaacttgaaacctatgcttttgttcattttggattaaacacctttaatgacttggaatggggctatggatttaccccagcatccacatttaatcctaccgacttggattgcgagcagtgggtgcaaacgatcaaagccgcaggtttaaaaggtgtaattttaacagctaaacatcacgatggtttttgcctatggcccaccaaaacaacagactatagtgtaaaaaactctccttggaaaaacggcaagggagatatggttaaagaactatccgatgcctgcaagcgacacggattaaagttcggtctctacctttccccctgggatcggaattgtgtacattacggcactcctaaatacgttgagaaattccatacacaaatgcacgaactggtaaccaactacggttctcttttcgaatattggtttgatggagccaacggcggcaacggctggtatggaggaaaagaaggtgtccgctcgatagatgcaaaaacatattaccaatatgaaagagcacgggataccatcaaagcacaccaccctgatatcatcatttttggcggaactgttcctgatatccgctggatcggaaacgaagaaggacgcgccggagcgactcaatggagtatctttacgccagagcccaatactcctaattaccgccatagcgtatggggagatgaaaacggagacatgtggctcggtggagaatgtgatgtctctattcgaccaggatggttttaccatcccagagaagatcaccaactgaaatctttggctagaatggttgaactatattatcaaagcgttggacacaatgctaacttattgttgaattttcccatagcacttaacggtaagatcagtccagcagattcaacacgcgccattgaatggtatcatacaatacaaaattcattcaaagacaatctcttaaaagattgccatgtagaagcttcccaaactagaagcaatgaatacaaagcagaattcgtgacagacaataattgggatagttattgggctacacccgatgacattccaggaggatctctcacattcaccctaaagcaacctacaacactgaaccgcctaatcttacaagaatacattcctttaggacaacgggtcagaacatttgatatcgaagttgaacacaacggccaatggttcccgataaaaagcgtagactctaccacaacaatcggctataaacgcattgtccgctttcaaactgtaaatgctgaaaaaatccgtatcaatttcactgattcacgaggtcctttatgcataaataacgtagaagcttatttggctccagccctagtaacagagccccgtatcatccgcaacgataataatatggtcaccatccgccgaggagaccatggagctgtaatccactataccacagatggtacagaaccatccttatcatctccgatctacaaggaacccttttcttttgcatataaaggaactgtcaaagccatgtcatacgacccgataacagaaaaaagcagccctgttaccacagaaacttttgacattcctgcaacagcctatcaaatcatttatcctgaaagcgaaaaagcacgagcaatattggacggcaacggatatagcgctatccatcttccccgtgataaacaggaattggtaatacgtctagataaaaaacgttctttatccggttttcgctatactcccaaccaacaaagagatgcaggaggctatatttcctactaccaattatatatagatggaaaattcatcacagaaggagaattctctaacatcaaagctaatccgatagaacaaatcatccgctttcctgccatcagcggtcaggaaatacgctttgttgcgctatccattgcagacctacgtacacaagccggaattggagaattttcagtcatcaccgaagaataaccataaaaaaaagggcagccatgtaaccataactgcccttttcaaatatctgaaaaatcaaatagccttcaaaaggtttaccatttccacagcagtagtcattgcatcaaaacctttatttccagcctttgtaccagctctttccactgcctgttcaatagaatccgtcgtcaatataccgaaaatcacaggcactccggtctgcagactcacattggcaattcctttggtagcctcattagccaccatatcaaaatgaggtgttgctccacgaatcacagcacccaaacaaacaacagcgtcatattttccactttcagccattttctttgctacaagaggcacttcaaatgctcccggcacccaagctacatcaatattactgtcatcacctccatgacgcaagaatgagtcaatagctcctcccaacagtttagacgtaataaactcattaaaacgagctgcaacaatacctacccgctgtccttcagccaataatttaccttccagtttattcataatttcttatcttatttattcaatttatcttgttcctttttaatctcttctccagaacgaacatgcaaaatgtgtcccatctttttatacttagtgtacatatagaactcatttttctcattgcaagtcatctctattggctccctaccaacgacctctagtccaaagccatccagccctttaattttcaatgggttattagtcataagaatcatcttcttcacacccaaatcagctaaaatttcagcacccgtaccatattctctcaaatccgccttaaacccaagagccagattcgcctccacagtatccattccgccatcctgcaaatggtatgccttcaatttatttatcaagccaatacctctaccttcctgacgcatatataataacactccacgtccagccttttcgatccgacgtaaagcctctgccaattgttcgccacaatcacaacgcaaagatccaaaagcatcaccagtcaaacactctgaatgcacacgacacaataccggctcgccattagctatatcgccctttacaagagccacatgatgctctcctgtaattttattcacatatccgtaagccttaaacgttccatattttgttggcatctcagcctctgtcacacgctcaaccaaaatctccgtacggcggcgataattaatcaaatcggcaattgttatcatcttcatgccatatttccgggcaaattcctgcaactccggagtacgcatcatcgtcccgtcctcacgcataatttcacaacacaaaccacattctttcaaatgagcaatacgcattaaatcaacagtagcctcggtgtgtcccatacgttccaacactcctccgctcttcgcctctaagggaaacatatgtcccggacgacggaaatcggtaggtttcgcaccatcttctacacacttcatcgcagttaccgaacgctctagtgctgaaataccggtagttgttgaaatatggtcgatagaaacagtaaatgcagtacaatgattatccgtattattcgtaaccatctgctccaaccctaacttagaagtcaactcccggctcatcggcatacaaatcaaccctttggcataagaagccataaaattaacattctcaagtgtcgcatgctctgctgcacatatcaaatcgccttcattctcccggtccggatcatccactgcaataatcatcttgccggcacgcaaatcggcaatagcctcctctattgtactaaacttaaaatcttccatttctattattttttttacattttactttttctatatttaaaaaccatttgcctgcaaaaattcaaggctcaatcctccttcaggcttatgagcacccaacaatttttcgacatacttggctatcatatcattctctaaattaacgacagcacctactcgtttggatatcagagttgtttcctcctgcgtatgaggaatgattgacactttaaataccgatctgtccacatatgccacagtcaaactcactccatcaatcgtaatcgatcctttttctatgatgtagtgcaatatatcagacgaagcagatacagtcaaccaaatggcattgtcatcccgttttttgtcaacaattttcccgacaccatccacatgcccagccaccaaatgtcctcccaaacgactgttcagacacaaagccctctcaagattcactcgatcaccaggcttcaaaatccccaaactagaacgatgcattgtctccggcatcacatcagccgaaaattgattgcttcccaattttgttacagtcagacaaactccattcgttgcaatactatcccccacacgggtactctccaaaacctttgttgcctcaatttcaagttcaacgctcttacttccccgacgtatcgcctttatcttacctatttcttctataattccagtaaacatatcatctttcgattaacccatgaatcaatacatcctttcctaccatttccacctccacatttttcaactctacagcctccgacatccgcgcaaacccctgtccctctacaggagttttagctttctttcctcccaccaacttaggagcgacaaaagcatatacctcatcgaccaaaccattacgtaaaaatgtctcgttcagttgacctcctccctccaaaaaaatggagtcgatacccattccacccaacttcgacagcatatctacgcaatccacatgcccattctgttctctacacaacaacgtttccacaccacatgccgacagcatccgtaacttatccggatcggcagttgctgtatgtgccacaatcgtccgataagtgacagctgttgtcaccaacttgctatccattccgacacgagctccgctatctacaacaatccgcacaggttggcgaacctctccttccaatcggcaattcaacatcggattgtctgcaacaacagtcccagaccccaccataatccccatatatgttcgacgcatctcctgcactctcatacgtgccggctcgcctgtcacccattttgaatcaccagaatacgcagctatcttaccatccaatgtcatagcactcttcatcaccacccaaggcatccgattttgaatgtatttcaaaaacacccgattctgagccttcaattcttcactacaaacaccaacttccacatcaatgccagcctcccgcaaaatgccaatcccctttcctgccaccaacggatttggatctgtcaacccgacaacgactcttgcaatcccatgttcaacaacagcttctgtacaagggggcgttttcccataatggcaacaaggctccaaggtcacatacattgtagccccaacagtatcctcttgacaatttttgaaagcattgcgctcggcatgcagaccgccataacgttcatgccatccttcagcaataatccgtccgtcacgtacaatcacggctcctaccagcggattaggattcacccatcccgtccctctcgcagccaatttcattgcgtagcgcataaaatgtatgtcttgttctgtcaccataataaaaatgccctgaatctcttcagggcatatatacaaagacgtagcatttaccaagccaatgcaacatttcttctatcatccggactgtcaccgtcggtatcggaatttcaccgattcagtccccataagggagtcgcggactatcaccgccggtagggatttacaccctgccctgaagaaatattattcaaatacactgcaaaaataaagtttatttcggaaaaacaaaatgctcacacttattttgctctataatttaatatattcacatgatatataaagtctttgccatatctcttattagaacgcgggcgcggattatcatcatatactcccacatgctcaatatcgacacgcctaatcacatcctcatccaatacctcttctataggctcatgtgtaagcaacaccattggagaatgctcttttaatgatgtcgtatccatttctatcggacgaattttcctatgtgccgcatatactaattctatacgcaacggctcgctggcatcgtgataaaaaggaagatcgtgcaatatttcaatctctcggaccgaagctatacttttcatttccggattattaataatacttttaagactagggaacaatatcacttctgacaccataaaaagtattgccacagcatacaccaaatattgtattctcaatcgcaaaccagcccaaatcaacacaagagccacgacaaaacaagtacaagtcattataagccacagtccaaaagtcattttccccacacttaacataaatacccaaccaaaaatcggtaaaagcatcacagctatcactacaagccaaacattaagacgaaatatcaaacaatctgccctttccacagcaccactaacaaaatattttttccaccaatcaagcagatatcccatcaacatactagcaggaatgagcaatgggaaaacatatctcatcttcttttccggcaatagagacaacagaacaagtgctaccaacatccacaacaacggcaacaaataccatttattttgccttaattgccttttccaaacaggcaaaactatagccgtaagcaataaaacaatccatactcccgattctaaaaagaacttccaataataataccatggacgtacattataactaatccaggctgtcgattccttttccacgacctcagccagctcattcggatatgacaaatgaataaagacaaaccaccatccccctaccaccaatgcaatcatgcacattacacttataacagtccaacaaatcttaatcctccccctaaaaacaagagcaaacacaataacaaatggcaacaagagagcataaacagacacaggacctttactcatcaaagaaagtcccaccaatataccggacataataccatgtttccattttctatcaatctccgtcattgccgctgccaaatgatatattccccccatcataaatgcatgacaatagacatcccacgaagccgttcgccccatcagaatcacattatagcaagtacacaaaatcagcgtagatacaaagggatctattcctaaaaatctttttacaaaacgatagaaatagaataccaaaagaagggctgccaaacccgccagtccacgctgcaaacctaaactatcaggtgcaagaatttcgccaaccgcagcaatccatgtcggcaacggcggtttttcaaacctcaattcaccattcatcgttggcacgacccaattaccgtcatacaccatttcacgggcagtaacgatattcctggcttccattatgtccggcaacaacacagaattgttcacaaaaaatgttatcaaacaaaacaccaacagaaccatccatctgacatgattcgtcacaaacccatatgccatactcagatacaattatgttcgaagtcgaaattttaaaaataaaaaaaaacatcgaggctatacatacaaccaacaaatgcataacctacgatgcaatattcgcaaaatcatcaatatctacaaacaagccgtttatattttaactcgaattaacacacagacatccatacccgcactatgaaaaaagccgcccgaacggggcggcttccatataaaatcaatcattctgcttcatgctcggattagagttcatctcctgctccggtatcagaaactgccactggctgtctcctgcctccaccttggcaggcttgatgaacgtcgggtcgtgtcccttatccgcacggtcaagcggcagattcagacgcttcaaatccataaagcggaaaccttcacccaacagttccaaccgacgctgcaacatcacctcttccaccaaggcatcaccggtcactgcgggacgttcatattccgggtcgcgggctttcaccagttcatacaatacatctgcagcctttccatcctgaccactgcgagccaggccctccgcttctatcagatacatttcggctgcacgcatatagcaatagtctccggaccaattggcataagacggcaaacgaaatttattaaccgtataaggaggaactataaaaccgccattgtcacaaaacagtgtatccacttccgaaccgatgcacaccatttttcttacatcatcatcacccatcttcgcatacaattgcgaattgatgcgcttctcattgcccatctcattatatcctatcgaacaaggatctgtatgcgcaaaataagaaccgtaaattgtcgactgatcagccttaatctgcactccccacatccattccggattagccacactgttaaagccggatgcaaacaaatcggcagacatcaagctaaaaccctgtctcgccttattcgccatctcagcagcctccttatatttccccattgtcaacagtacttcggccttaatcccttgcgccacattcaaattaaaatgactgatatgctcacgttctccggttaaaagcatcattgccgaatcaaggtctgtattgatacgagcatacacttcctctactgtactgcgggcatttcccactctagtcggatgcgtatatattggaattcccaactgagtattgttcccttccggtttataacgttctgcataaagctgcactaacttaaaataactatgcgcacggaaagcataggcctgtcccttaagattatctcgttcttcttgttcccccttcatggcatctacattagaaagcaacagattcatattatcaatcgtaccataataatacatccacacaaattcattgtccccgtcagacgctcttctgtgtgactgccaggaataccaagattcataataattccattgaccgtctcctgtataataatcttcacacaacatttctgtcatgatatccacagccttctgcccgaattgtccctgagtggcataagcatcacccacaccaagataagtacgacgcaacgtaccgttcagcaacatcaatcctccatccgttgaagtaagcatcatatcatccgtatatttatccgacggacctcgatccaaaaaatcactgttgcaggatgtaaatgccagcatccagaccaacggcaatatatacaatgttttcataatcatctaatttagaaattaatattcaagccaacagaaaccacccgattcggtacatacgtattgtcactgacaccggaaaacgcctgagtcggatccattcctttcaatttcgtgaatgtcactagattatccccactcacaaaaactttgacagaagacattttcatgcgcctgctccactcgacaggaagcgtataagagaggttaatattacgcaaagacagataagaagcattcttcaaaaaacggtcactactacgtcctatatccctgctacccttctcaaccctcggcacatcagtcacatcaccaggatttctccaacgtttcataatatccttatgccaggcattccccaaatcacccgcatgcatcaacaattgataattgctatcatacatcttaccacctgccgagtaagagaaaaataccgacaagttcaatcctttccatgaaaaattattggtaaaaccaccatataccttaggtatggcagaacctacatgctgcttgttcttcggatctttggataccagcgaataatcatttgtcttttcccaagtatcattatttttataccaccacaattcatcaccgttttcaggatctacccccgcccattttaccagccagaaatcataaatagaacctccttccacccattttttcgtaccattccatacctcctcctgagtcagtttggtcagttcattcttgtagtgagtcaaattaaagtccagtgtccacttaaacgcactttccttaaaaatatcgaaagacaattgtagctcaacccccttattgtccatcgatgcagcattctgagtcatggaagacaatcctgtagaaaaagggacaggcacggcatacagcatatcttctcccttacggataaaatagtccacctctccacggattcggttcaaaaaaccaaattcaagaccgacattgaaattggaattttcctcccaatgcaaatccatattacccagtgtcgaatgaatggatcctgcataatcatgattggcataggcttcaaagaaattctgccatgcataataattggcaaaatcgtcaacaagtatattgtcattcccctgcactccatacgacactttcaatttcaagttgtcaatccatccgatatttttcataaaggactcctgcgaaattctccaggatgcacccaccgaccagaaatttccccaacggctatctttataaaagcgtgaacttccatccctgcggtaagaaccggaaatataataacggttatcaaaatcataactcaattgtccgaaccaaccctccacagcatattcatctgttttactgttaccatcctccaactgcgctccaaaagccagatcaccagacattgccaatgggaaaccggtacgtcgtgcataaacattcttcttcgtatatcgatagctttcatgccccaccatagcagccacattgtgcagaccaatttctttattaaaattcaatatctggttgaatgtaagcgattccattctcaatgcctctacaacagcacgcccacccacattggcagcatctccaaactcattattatacatactgttataacgacggtttacaatatcggcacttccactcaccttaaatgtgaaatcacgcaagaatttcgttccggcagtaatgttaatattgaaattatcagtctgattattgacagcatcatgaatcaatgaagccaaattattggtccttccgttaaaaggacgagtctctccataatcaaaaaccttctctcctacttcatccaaaatataattgccttgttcatcgcgcttataaatcgggaatatcggagcaatcatacgggaataatagaacggattgatggcatacgttccctctgcctgcatcatataattacttttgttattagtgtagcccaaattcccctccaaattgaaccaatcggtaaactgattgctgatattcgctcttgctgtaaaacgctggtaatcagtactggtcatgattccctcctcatcaagccatccgagcgaaagataataggttgtctttccggaaccgccgctcatggaaagcatataatcctgcttcaatccagtatgaaacaaagcatcctcccaatcatcatgataaagcaactgtgctgaaggatccaacttaccgtctacacctatcagcttgtccgccgccacattataattattataaccgccgagctgcttgttgataagattggcagccgcataagcagccgactcctcaggagaattacctgcagcaatcaatgcattccgataggcttcccatgcagtctcgtaataatccttcacaccgatacgtgaatactcaggaatcgcacgagaagagaagccccatacagccttgacactcaaggttgacttttcggcacttccctttttggtctgtatcataatgactccatttgcgccacgggctccgtacaaagcagccgaagccgcatctttcaacactgatatcgattcaatgtcatcaggattaatagcactgatatctccgtcaaagacagcaccgttcaacacatacaacggtgctgaagaagatgatagcgaaccgatacctcgaatacgtatcgatgcccccgaacccggctgaccggtaccgcccatcacctgcagaccgggagatgtaccctccaaagccttggtaacggacacgacattcattttttccaactgctcgttctttatcacctccgcagcaccagtaaaactcgatttcttggcagttccgtaagccaccaccatcacctcatccaacttcttgttcacaggcttcagacggacagtcaggtcaggcttgacacccacctccaacgtttccatacccataaaagaaaccaccagcgtagtggcagataccggcacattcagcgtaaaacgccctttatcatcagaagccacaccgatagacgtacccttcaccaaaatggtggcaccgggaatcggttcatcattctccgcagacaagacgcgtcccgagacgctcttcgtctgtgcattcagcaagcctacacccaccaacaggcatgtaagcaaaagcaacagtttgtttttcataaataacaggtttttagtttaagctaatagttaatacatcacaaatgccttcaatattccctatggcatccaaaagcatccgcaccagcccacgtgggaaaaaaaaacaaattatgtttattttacttactatttgtttctttaatctgaagcatgaccatttcatcgtacgcccgaatatggtcatttcctcatcttttcatgaagatttcaaagcaaatgtattaatcattttcgatattccaaatcaaaacactaaaattaactcaattatttcttaattttatcctaatacgacatacaatacatgcaaaacacaccctttttcacaaaattaaaatcataatatgcgaacaatctcataaaaatattatacttttgaagtcagaataccaataaacttacagttatgtacggaaaatttcaagatttcttaaaaactgaaattcagtctatcaaagatgccggcttatataagaccgagcgactgattgctactccacagggagcagaaattaaattaactacaggcgaaactgtattgaacttttgtgcaaacaactatttaggtctttcttctcatccgagagtaatcgaaggtgccaagaaagcattggatgcacgtggctacggaatgtcatctgtacgcttcatctgcggcacccaggacattcacaaagaattggaagctaagatttctaaattcttcggcacagaagacactatattatatgctgcatgctttgatgccaacggtggtgttttcgaaccgttgttcagccaggaagatgccatcatctccgatgaattaaaccatgcttctatcattgatggtgtacgtctttgtaaagctgttcgctacagatacaaacatgccaacatggaagatctggaagagcagttgaaaatttcacaagcacagcgtttccgtatcatcgtaaccgatggagtattctcaatggacggtgatatcgctcgcctgaaagaaatctgcgatctggcagacaaatacaatgctctggtaatggttgacgacagccatgcagccggcttcattggcgagacaggacgtggttctgcagaatacaacggcgtaatggaccgtatcgacatctttaccggaacccttggaaaagctctgggtggagctatgggcggttacacaaccggtaaaaaagagattatcgaaatgttgcgtcaacgttcaagaccttatttgttctccaactcattgtctccggctatttgcggagcttcaattgctgttttcgacatgttgatggaaagcaccgagttgcgtgaccgtgttatggacaacgctgtatatttccgtggcaaattgaaagaagcaggttttgatatcaaaccgtctgaatcagctattgcagccttgatgctttatgatgcagtattgtcacaacaatttgcagctgaattgcagaaagaaaatatttatgtaaccggtttctattatccggttgtaccgaaaggacaggctcgcatccgcatccagttgtctgctgctcacacccgcgaacagttagaccgtgctattgcagccttcatcaagattggtaaaaaattgaacgttataaaataatcgtccaatatcaatcataccgactgccccgggaactctgctttccggggcagtttttttatattccgaatattttacctatccatataccaattatccctctccaacattatagattcattaaagataaattcatctcaaaatcatatcaaagataacaaaagcttatctttgatatatatttaagatatagttgtcttatatttgtcatataaatgagagggaggggagcaagaggaatgcaaaagaggtacaaaagaaaaaacaatatacactaaagagtttccagtcaattcaatcaatcctgatatataggataaatatatgccttcaaattatcatgctataaataaaaaaacgggcagactttcgtccacccgcaaacccgcctcagatatgtcgagaaatcctaaacagttatcatttttaattcttcgcccaattcgtgtaatgcattcacaattttcatcgcttgctcccgtctcggttttacacacccacatgcataatgactgagttgcccctgattgataccagtcagatgctccaatgctgactttataaaaatcttttgatacaccgataacaatgattcaacatgtaataagcaaattttaaatcgacaattttcggaaaagtaaaatcgacacaaataagtcgagacaaaatgttaataatatcaattaaatactatagccaaaccctatttaaaggggattatccttattctttatcattgtcaaagatggattttctatttcccattctgtagctttgtccagagagtttaatgacttcacaatgatacaaaagccgatcaagtatagcagaggcaagcacttcatcatccagagtttttgcccattcagtcggagccttgtttgttgtgattatcaaggacgctttctcatggagagtgttgattaggttaaagaaacccgctgcatcttcttttttcacagggaacagcattatatcatcaatggcgacgaggtcagctttcaacaaacggttgtaggcagtcatggcagatggcatcagtgttttcattttaatggtgtttataacatcttccatcgtaaccatgtatgccttgtaaccttgcgataccgcttcatagacaagtcctgccgcaataaatgttttcccggtaccggatggtcccatgagtatcagattgtaattctgttcaagccatccgagatgccttaattcacgcagtcttggtgcggttatgccttgtgagtaattatggtcgaaaaggtctaggtcgtgtcttgacggcagagaagctgcttttagtcgccgttgtaagtctttgctatccctttccagaacttctctagcaagcaaatcatgtaaaaattcaacataggtcttgctctgttcccgtgcaatatgggcttcggattccaataacctcggaagggcatacaagcgtaaacgcgagcataaatttttaatctgttcgttcattatcatataaaaaaggtattgaatgttgatatgtctgttttatcgggcaccatggaagaggtatcggaggatgggaccggctctgtttctacaggaacttccacaagggcctctcctttgtggactctgatactttcggctactttcatcaggctacatccattaaagaccttcacttccaaacatcttgtaaaggcttctatcaacgtgggttctgtatagaagggatatcggagaagtataaactgcaggttgtctctatagttacgattcttatgaatgcgtagttcagataaataggtatcaatgaccgtatccccgggaagtcttttacggacagtagcctcgtaatcatccaaggcagcttcacggtctcgccgatgtgaggtattacttattaactgtcctttatctttgcagattttgtgtgctgctatatttttccctgtttcaaggctgtaaatatacagcatctcttccttttcttccagatatacctgtgttcggtgaccttggtaggtacctgtaggaacactgtaatagttccccttgtaggtaatcacgttatccttcctgacatgatggggtaaaagctttggggaagggattgtcggaattccccgataaggcatgagatggggtcttcccatctcgaactccactgatgggatacgacgtatgccatgatgctccataccgttagcagtacgttgcaaccatgcttgaacctcctcgttgagttgctctatggaggtaaattcacgtccccggagaaaattgtactttacgtacttcactacgttctctatctttcctttgctttcgggatctgatttacggcagaacaccggctcgaacccatgttcacgaaccaaggctcgaaagccgtgggtaagtatcaggtctcctaggttctccttgacaagaaaaaccttgtcctggtcataaactattttccgaggtactcccgagaaatattcaaaggcaagttcgtgggcataaactgcaagatcggtagtaaacggggtacggctgaaataaataaatttataacggctacggctaagactcattgcaaaaaaatatactttcaagggtatgccttgcgaagtcttcatccagcgttctccaaaatcgcattgggcatattgaccataaggtgtttccggttgcttctcataaggacggtaactcttttccaattctttgggcagattatgattcagacgtactcggttgacaaagttggataccgttttagctgtgacatggggaaggtctgtaaaatgttcccgtaaacggtcatggagttgcggagatgacaaaaatggccatttgcgtaactctccgataacataagcttcataatcatcaagtttatggctgtatcggcgctcgtaactttgactctgcttaaactcttcttctgtcatagacagatacttggacaccgtttgacggtgaagacctaatgatatgcctatttgactcttgtttaggccatttgaaaataattctttaactttgtaccacattagatacttctgtaatttggaagtctcactcatagcattgtgattagttgttgacaactctaatttacaatgctattttcttttattctattgtcgattttacttttccgatttttgacgatacaaaattaccgattacattcaacatcagatttatactctagctgatattctccatcaaatatcggaggatactcttccccatcattttctgcacattcaatgtaaaatttaatactgtctaacacctccgactgcaactccttgaatcctcccataacagcaaccacccatcccggcaataaatcacagccggcacaataaccattatcggtctttcctacggtaattaatagtgctgctcactcccaatttctatctcctgccgacagaattgaaaaaaaattgaaagaaaaatagagtgaaatgtttacatatattacgaaaatgctatatatttgtagagtgaaaaaaaaataaaaacacagagttcatgaactggaatgagatgaagaagaaagcggtggcacacggttttgttttcctgaaacatggaagccggcatgatatttacgtgcacaaggagaccgggaaagtcattttgctggagcggcactggtcacaggaggtgcgaccgggattgatgaaaaaactgaaaagtgaaatcgggttttaatctgatttcacaaattatctaaataatatagttatgaatgtatctattgaaaaacaaaaagatgggagttatattgcctacaatacggattgcgagggattgtctttaattggtacgggaggtacagtagcagaggcaaaggatgatttcttcacttcgatgcaggagactgcggaggcatgcagagaggcagggttgccgttgccggcaggattagaagaggatccggtgttccggtttgacgtggcatcactgttcgagtattacagtatgattaatgtgagtgcattggcgagatatctggggatcaatgaggcactgatgaggcagtacaggagcggcggaacgtatatttcggaggcacaattgaagaggattgaagacggaatacatgtattggggaaggaattcatgaatctccgactggtgtagttatcggatttaagatgataatttgagaggaggacatctattgcggtgttctcttttttaagaaaagaaacattaaaaagtataaaacaagaaaataaaagttaccgtcatatcgcaatttttatggagacccaaatgtagaccttttttatgatatttcccgccttttcggaaacatcataaaacaaaaaagacgctgaaaaacagcgtctttacgtattggaaatgttatctttgtgcccaggacaagactcgaacttgcacagcctttcgaccactaccacctcaaagtagcgtgtataccaatttcaccacctgggcaaatccaatcttgcaatgaagaactttaaatgtgcccaagataggactcgaacctacacggccgtgaagccactagtacctgaaactagcgtgtataccaatttcaccacttgggcatccactctttgttgtcccactaggattcgaacctagactgacagaaccaaaacctgctgtgctgccattacacaatgggacaaggtggatgtgtcgttattgacgggtgcaaagatacgagcatttttttaatctgcaaacaaaatgaagaaaaattgggtaaaataattattttcgtgttttattcgccatatatgcgtatatttggcagcattttacgcaatttgaaacaggaaaattatccttattatgaatatgtacactataaaagaccatccaaatctaagctttaggctcattaaccgtgtaaccggatgggttgcattcgttattgccagccttacgtatatcctcacggctgaaccgacagccagcctatgggattgcggcgaattcatagctacatctgtcggattgcaagtggggcaccctcccggagcacctttatttatgattatttcccggctgtttgccatttttgctccctcagcggatacacaggctctgatgattaattacatgtcgggattgtgttcaggatttactatcctgttcctattttggtctatcacccacttggctcggaaaattgtcgtaaaagaaggtgaagagatgactttaggacaaatgtttgccattttaggagcctctttaatcggctcattaacttatacattcaccgacaccttttggttttcggccgttgaaggcgaggtttatgccatgtcatcgctatttacagccatcgtgttttgggccattttgaaatgggagaatgtcgcattcgagccgtatgccaaccgctggttggtgtttatcgcctacttggttggactctccatcggagtacacttgctgaacttgctggctataccggctattgtatttgtttactatttcaagaaatacaaaccgactccaagaggtattgtcaaaaccggattgttatctctggtgattcttggctttgtcaacttcatgctgattcctggcgtcatcaaaatagcaggctggtttgaactggtatttgtcaatggcatgggtctgccattcaacaccggagttgtcgtatatgtactgcttattatcggtgcattgacttggggaattcgctatacattaaaaaaaggaatgccgatatggaataccatcctcacttgttttatggtcattttaattggctattcttcttattcaatggttgttatccgctcgttaagcgaccccatcattgacgagaacagtccggataatgttttctcactgttatcctatattaaccgcgaacagtatggagactctccgctcctgtatggagcctattataatgcacctgtcgtagcttacgaagacggagaacctatctactaccaaaacaaagaaaccggtgtatatgatgtaataggacataagcaaaaactagaatatgacaagcgcttctgcggcattttcccgcgaatgcacagcagttcacgtccttattaccctcaacaatatcaggcttggggaggtaaaaacaacggaccgacctacacggtaaacggtgaatcaatcacccgtcccagttttggaaataacttgcaatatttcttcaactaccagttgggacacatgtattggcgctattttatgtggaacttctccggccggcagaatgatattcaagggaatggagaaattacccacggaaactggattaccggtatcaaattccttgatgaaatccgcctcggaaatcaagatgaattacctgatacactgaagtctgaaaaggggtataataaatattatatgcttccctttattttaggtctgttaggcatgttctatcagtatcgcaaaggacgcacaggcaaacaggacttctccattgtcatgatgctctttatcctaaccggtattgccatcattgtctacctgaaccaacctccgatggaaccacgcgaacgggactatgcctatgcaggttcgttctatgccttttctatctggattggcttgggagtgctttccatttgggaattcctcaattcgaaactgaagaaagccaatacagcccagacagctgttgccgtgacaatcgtatgcctttttgcggttccggtgaacatggctgcacaaaactgggatgaccacagtcgtgccggacgttacgcaactgtcgctcatgcaaagaattatttgaattcatgtgcccccaatgccatactctttacctacggagacaatgacacattccccttgtggtatgcccaggaagtagaggggtatcgccgggatgtaagaatcgtgaatttaagtctgttgcttggctcttggtatatcgaccaattaaaacgtcaggcttacgagactcctgctgtacccatttcattcaaacgaaaccaatatcgcgaaggtatcagagatcaagtggccattgtcgaacattataaacaggccacactgaaagaggtaatggaatttgttgccagtgatttaccacaaaccaaactgacaggatattccgagcctatcgattatataccgacacgtagattgattattccggtagattcaactaaagtggtggcaaatggaatcgtcaaaccagaaaacgccaataagattttgaaagaactgccacttgatttaaaaggcaacttcttaaacaaatcacaattaatggtgctggatatcatcgccaatgccaactgggaacgtccgatctactttggtgtaggtatgggcacagaggcttatctcggcttggaaaaatatttccagttggaaggcgcagcgtatcgtctggttccacttgaaacaaaagatgcaggcttcatggattatggtcggattgactcggatattctctatgacaacttaatgaataagttcgaatggggaaatatcaaagatccaaaagtaaacatcgattatttccacgacaatacaattgccgtcatgaaatatcgtaatacattcctgcgccttgcggaacaattacatgctgaaggcaagcctgaaaaagcaattgcagttttggacaaatgtatggaagagctccctatcactcaagtaccggtagacaataccctactgaattacattccattgtattacacattgggagctacggaaaaagcaaatcatctgctgttggaattggcagaaaacaactaccaaatgttgagatacaccaattctctgtcacctaaatttgcaaatacagcaggaatacagcaggaagaaaacatcagcatgcatgtcatccagatgctgtttgaaattgctatgggagccggacagaaagagctggcacacaagataaaaaacaaagtagaaagtatttataatccggcattattgcgcacggcccagcctcaatcggctgccgtgcccgctgattccgggagataaatgattaattttaacaacaaataccagtatatgattacaatagatcaactgaagtcagttgaagaacgcggtggcgctctgaggaggtatctttgacatcgaccgcaaaaagatagaattagaagagatagaaatgcggactcaggcaccggatttttggagcgacgcaaaaaatgcagagaaggtgatgaaaaaggtccgcgagttaaaaggctggattgaaggttgtgaagctgtcactcgctctgtggaagatttaaatgtattgtttgaattcgccaaagaaggcgaagccacagaagaagaagtagatgctcactatgcagaaacaattgagctggtagagaatctggagcttaagaatatgcttcaaggcgaagccgaccaaatgagttgtgtattaaaaatcaactcaggagctggaggtacagaaagtcaggattgggcatccatgctgatgcgaatgtatatgcgctgggcagaagctcatgggtataaactaacagtaagcaacctacaagaaggagatgaagccggcatcaaaaccgtgaccatgcagctagaaggagatttcgcatatggatatcttaaaggcgaaaatggagtacaccgattagtgagagtttccccattcaatgcccaaggtaagcgaatgacttcatttgcctctgtatttgtcacaccattggtagacgactcaatcgaaattgccataaatcaggcagatatcagttgggacacattccgttcaggaggcgccggaggtcagaacgtaaacaaggtggaaaccggagtccgtctgcgatacaattacaaagatccggataccggagaagtccgtgaaatattgatcgaaaacacagaaacccgctcgcaattggacaatcgtgaaaatgctctccgcttgctgcgctccatgctttatgatatggaattacaacgccgtatggcagaacagcaaaaaattgaaagcaacaagaaaaaaatagagtggggctctcaaatacgcagttatgtatttgacgaccgccgggttaaagaccaccgaaccaattaccaaacttcggatgtaggaggcgttatggatggaaaaatcgatgcttttatcaaagcatatttgatggaattcggagctcaagaataaaataaacgaagtagcttaaagctacttcgtttattttttacacatgtctgcaaaatattgatgaaaagcagaattctctgtcaattctggatggaaagaagtggccagcatattaccttcacgtgctgcaacaatgttatcatccacacgacataaaacttctacattacctcttacttccgttatataaggagcacggataaaaaccagcggcaccggattctcacttatctcaggaatcttaacgtccactttgaagctatcaatctgtgttccataagcattccttttcacggctatattcatcacacctagatgacatacagaatcgtttaccagttctttagcaagcaaaatcatgcctgcgcacgtaccccatacaggcaatccttccaatatcctttgccgcaaaggttccatcatcccagtacgattcaataatttacccatagtagtgctctctcctcccggcaatataataccatccagttctgacaactgctcaggatagcgcacaaccactggttcatgccctatagctgcaatatgttgctgatgttcaacaaatgctccttgaaatcccaatattccaattttcattatattcattttaagtttaaaaaaagagtgccgaagcactctcttttttattaccatcctctttctgcgtatttgttttcaagagttttgatttccagtccggacatcgcttctcccaagttttcagacaactctgccaatttaaccgggtcattgtagtaagtcacagcctgaacaattgctttagcacgtttttcaggatcaccagacttgaagattccagaacctacaaacacaccttcagagcccaactgcatcatcaaagcagcgtcagcaggagttgcgataccacctgcagcaaagttcacaaccggcaattttccgttttcatgcacatattttactaattcaaacggtgcgcagaattcttttgccaagctcatcaattcttccggtccagcatttttaacacggcgcatatcatcattaatctgacgcatgtgtgtcactgcctcaaccacattaccagttcctgcctcaccttttgtacgaatcatagccgcaccttcaccaattctacgcaatgcttcacccaaattacgagcgccacaaacaaaaggaactttaaaagcagttttatcaacatgatacatttcgtctgcaggagtcaacacttcactttcatcgataaaatcaataccgatagcttccaaaatctgagcttctacaaaatgaccaattcttacttttgccattacaggaatggatactgccttctgtattgctttaatcatctgaggatcagacatacgagcaacaccaccatcacggcggatgtctgccggtacacgctccagtgccattacagcacatgcacctgcagcctctgcaatttttgcctgctctgcattcgttacatccataataactccgcccttaagcatttgggccagattcttgtttaattcatattttcccatgatatagtaaaattttaacttaaaagtttattaaacattacgattaaatcactcaaatccaaatacaatatttttagaatattcttctccaggtttcaataacgtagaagggaattccaaatgattgggcgagtcaggaaagtattgcgcctctaaagccacccctgcataaggaccataattccgtcctttttttgcaccctgtatattcagatagcgaccagtataaatctgcaatccgggataatctgaacatacatacatttttatccctgtctccttacttgccaattctgccattcttttcatttttcctggctgattgaaaacgaaacaatcatccaatcctccctgattatctattacgtggcaaagagctctagggtttgtaaaatcataatccccctctgccaatacgaacgaaccatccggtatcaaatcatttgtctttaaaaattgatttgtatacaatttcaacaaatgagacttaatatcctgacattcgggattcaaattaaaataaggatgatgtgtcaagttcacataacaattcttatctgttgtcgcatgataatgtattttcaactccctgtcatccaccgcaaacgttatcttaacattcaaatttccaggatattcctcttctccatccggactacaatagcccaaagtaagacttttcccatcataagtgacaacatcccataactttttatcaaagccacagatacctccatgcaaatgattcgcaccattatttacagccaattgatatttcaccccatcaagaagaaatactccaccagcgattctattggcatagcgtccaattcctgctcctaaataagctcccgatgcagcatattctgatgtcatataatcctctgcattctccatccccaacaacacatcaacgagattgccatttttatccggaacgaacatccgaattatcgtagctccccacctagaaatatgaacctctagatatttgctctttaacgtgtatatttcagtcttttccaacatatacttaaatattatcacttttctatctaccaattattacatttcgtaagtaataatggtatcctcgccattgccaagaattgcccgcaaagatattcattaaaacatagaaacaaagagaaacaactaagaataaaaaaatatcattacttttgcgtattatataaacaattacacacaaacaataaaatatggacataaaagaacttgacaacagatttcgagctatttaccaaaaacaagccgaacatgctttttttgctccaggacgagttaatttaatcggagagcatactgattacaatggaggccttgtatttccttgtgcactcagttttggcacctatcttctaatttctccccgaggagacgaacaaacatgctttcacagcttgaattttgatttttcagtcactattaatgcaaacgctttcgtagacaaacctacagaatggatcaaatatcccttaggagtgatgaaggaatttgcagaccgaggcttcaacccttggggatatgatgttttatattatggcaacatccctaatggggctggactttcctcatccgcatccatagaagtcgtcacggcagtcatgctaaacgaaatgacaggagccggtttggatatggtggaactagtaaagatgtcccaacatgcggaaaacgattacgtaggtatgaattgcggaatcatggatcagtttgctgtcggtatggggaaagccaaccatgcaattgctcttgattgtgcaacattgaagtacgaatatgtgcctcttattatggaaggatacaaattggtcattgcaaatactaataaaaaaagaggattgacagattcaaaatacaatgaacgacgtagtgagtgcgaagaggctgtagcaactatttcaaaaatacaccctattaaatttttatgcgaactgggcatggatgaattcaatcaatacagccatttacttacaaacaacaccatacttcgtcgcgctcgacatgctgtcagtgaacaccaacgtgtaatgcatgctattcaagctctcaaagagggagaattgaataaattcggacagttgatgaacgaatcgcacaaatcactgaaggaagattatgaggttacaggtattgagctcgacacattagcagaagaagggcaatgtttagcgggggtactaggctcccgcatgacaggagccggatttggaggttgcaccgtgactttaattgcagaagacaaagttaatagctatatagaaaaaatcagtcaactatacaaaactaaaacaaatcttgaagcaaccttctatattgcagatataggtaatggagcttgtaaaatttattaataaacaattccaaatattatcatgaatccaagttttcatttcatagactttgcgatcctcggtgtatatgcattattacttataggaatcgggctatgggtttcccgcaccaaaaagggacaaacaaaaacagcagaagattattttcttgccagtaaagcacttccctggtgggctatcggctcttcattaatcgcagccaatatctcagcagaacaatttattggaatgtccggttctggttttgccggaggattagctattgcttcctatgaattcatggccgcactgactttgattatcgtcggaaaattctttttacccatttttataaaacaaggtatctataccatacctgaatttgttgagagacgattttccacaaacttaaaaactatacttgctgttttctggattgcacttttcatctttgtaaacttaacgtcagtgctttttcttggtggtaaagcaattgacaccataatcggagttggagacggaagcatggtcattccggccattatagcattagctctatttgctgccgcctactctctctatggcggactttcagctgtagcctggacagatattatacaagtagccttattagtcatcggcggactaataacaacacttatcgccttgcactacgtaactccagaaggaggtattataaatggtatttctcatgttgcagatgttgctggaaacaaatttgacatgatcttatcacgagatcacaaagaatacaacaacttaccaggaatttatgtcctagtgggaggactttgggttgctaatctatactattggggattcaaccaatatatcatccagcgcaccttagctgccaaatctttaaaagaagctcaaagaggtattgcctttgctgcctttttaaaaatgctcatcccatttattgttgctgttccaggaattgttgcatgggttatgtattcagagaaccttcacgatgcacaaaaagctttccaaattaccggttcaaccgcactaaataacgacaatgcttatccatggctaatcagtactttcattcctgttggtttaaaaggcttagtgttggcagcgttggcagcagccattgtttcatcactggcctctatgcttaattctacgtcaacaatctttacaatggatatttacaagccctacatcaacaagcaggcttcacagactcaattagtcaatattggacgtatcacagcagcagtggctttaattgttgcggtattattagctccacttttaggaggaattgaccaaatgttccaatacattcaagaatacaccggtcttgtaagtcctggtattttagccgtattcatcatgggactattctggaagaaagcgaccaacaaaggagcaatctggggcgtattgttatctatcccgattgcacttgtgttcaaggtgctaccactagaaatgccatttatggaccaaatgttctacacctgtcttatctccatggctatcattttcatgattagcttgagtacctgccctacagatgacgatcctaaagcaatagcattgactgccgacatgtttaagacagataaagtctttaacatttgtgcctatattatttgcattttattagccgtaatctatgttgtgtttttttaattagaaaatcagatagaataaacaaagcgacttcttttgaagtcgctttgtttatagataagctttaagccacactgtattttttaatccctttaattttttcagagccttcgttttaacttggcgcaccctttctgcagtaagacctaattctcgtccaatttcctctaaagacattggattataatcatctaaaccataatacatctccaatatcatagcttctctttcagacaacacaacaaacgaacgtttcaaatcttttcggagagaatcttgattaacgaaagtttccggcgtctgtacattggactctatcggcacatagacatcccccaaagcaacagcatcctcatcttgggttaacggagcatccattgaaatcggtttggaagatattttcatatactctttaacctccaaaggcgacatatccatttgtgcagccaattcttccgccgtcggttcacgctgatattcctgttccaaagcaccgacacagcgtgttaatttatttatcatattgattttattcaaaggcaaccgaatcaggcgggcattctcagcaatagcttggagaattgattgacgaatccaccataccgcataagagataaatttaaaccctttagtttcatcataagattcaaccgctttcaataggcctaaatttccttcattaattaaatcacctaatgtcaatccataattctgatattgctttgcaactgatacaacgaatcgtaaattgcaaatgattaaccttttgcgagcctctatatctccatgatgagctttttgtgcaagctctacctcctcttctggagtcaaaacgttaattttacctatctcctgaagatatttatcaatagaataggactcacgccctgttatctgtttagttatctttagttgtctcatattgtaggttaaggcggttaaagctaataaatgaattctacaaaaacaaacatttccaattatttgtactctgcctaacaatacgcttttaatcattctaagttgcaaactgctaacaaaaaaagaccctaattgtttggaggcaccaaaaaaaatgcatacttttgcagctcaaaagtgaaaataacgataaaatataattgacaatgaaacggacatttcaaccctcaaacacaaaaagaagaaacaagcacgggttcagagaaagaatggctacagctggcggtagagcagtattagcaagaagaagagctaaaggcagaaaaaaattaactgtatctgacgagcacagacacaaagcataattcttttatgaggatattaaaagctgccttttaggggcagctttttttaataaaactcaagcaaataataatggcaaaattagaaggtaagaatattaatagtttcgaagaattattggcgattgccggtcccaactttaacattctagaagaggaaatcgacattgaaatacaaaaaaaatttattgcaatgtctgaagaaatcaaacaacgccataattttgcaattttacaacaaaaatatctgcatgataacagcccactttttgatgagacaattgctgatgatgctaaaaaagagatattagtgattttgtcttacctcccagaaccaagtgcttatcgtgctatagaattattctcaaaattagatactccactaaaaaagtgggcaattgtttcactccaacaatcgcgtattttattacagtcgagtttattagatgatcctggaatcttcatttccaccggtctaggaggtcaaggttctttactacgcttttttatcgtcctccttcatgctaccccccaaggcttggaagaataccagaaaaatctgatgaaaaaagaaatccaattagccatcaccaaagcacaaggcattgttgaggagattgaatatacaccggcatacacaaccttattgcttctattaccactacagattgacttacctacagttttgaatggcatcattcaagaatgtaatcagtatggacattttttacgaaataatctacttattactaacgtcaaaagaattccgaatgaagagattgaacatataatcaagaatacatctcccaaagactagttattttaaatagtaaatcttatttgcaaaagcatatcatatttcttattacccgttatacgcatcaatccggaacctattgaatcctgacctgaataaattgtaattcctgatttaaaataacaagtcaaaccctttatcggcttccacgctaggttaatataactccgccatccctccttcatgaatgaagggaaagagtaagcatacaaagcattattttcaaatgcatataatctggattggtatgaatctgtattaaaccaagcaaccctgcactgcattttaaatttctctttaatatcttgatatattatatcttgataaaccataatacctttctctttattcatggcctttttataaaacaacatactagctcttgtacgacattcccatcgttcgtgccaatgacaagccaattggtaacgaatctcatgcttgcaccgtaatgctggaattcctccagacaaatcttccggacgtacttctcgcttatagcgtaaagaatgctcacatattgaatgggcataaacaagacttcccaataattcccaaccccaatctccttgtgcaatcatatagcgggcactaaaaaaacgaaaccagtcataatataaactcagctttaagcctttcaacaagtcaacatccaaaccacaatacaccccttcttcattagaagtattactgaattcaccaaaacctgcagcataatgtgaaatatagcgtttcccataatatctatacaacaaacaacctgcaacagccccttttcctatacgcataccattcactgttgctatggctcctctatcacacacggcagtctctccaaacaaataaattccccttattgctgttttatagtctacactaaacatccaacggttcatgccatcatctgcgtattgctgataaatctgttccccagatagcaatcctggtctaaaattataaaacaatgtattcaacccgactttaaatgcagaggtattccaatggtatgagactccagaagcaagagttttcaatgctcgttttttcgcacattcattatcatttctatgatatccggactcacataaagatacttttacatactcctcgtgttctatcgtatccagaggagtcaaagtaccatcgttttttttatacgaaaaaaatacatccaatgtcatgttacttttaggagcaaaagaaaaagccaccccccgcataaacttattttcatcagtagaggtattcaagataaaacctttaccggatttttcattgccaacggcaactccagacttccccatagaaaaaccaccccaagcaaccagcccctgcccccattgcaatttataatctccaacaacaacctgccgcaaccaacgcttacctgcataggccaagtacatagataagaaatcaaatcctattttctgatgacgggtaaaataaccttctccaggatcattttccaatacaattcctccctgaacttgctgattatagatatatttatatttaaacaacgtcccaaggggaggaccataaaatcgattttttacctttacattataatctttttcattttcatataaataaggagcgtaccttttatagccttctgctaagggaagagccgtcttcaccctagccaatatttcatgtctagtacgtatactttctgaaaaggaattaccacgactacagtctaaagcaataaaagacgaaatattttccaaatccctctggccaaagccaggaactaacaacaattcatgaatatcccgaaactctccatgcttctgtctgaatttcaataattcgtcaatctgactatcagataagaaaaaaagcattttcaacgaatcgaatcctgcagtattcaaatcaatgggatatttcgataaatacaaaagggtattcaacatatcctcatatccatcctctgtactttcaatattattactctccaacaaacgctccacatccgatatattttgagcaaaacattgaaaactgacaaacagaagaaagaacaataagcgcaaactattcattttcatcactagcacaaaaatagcaagcagataaatttacaaaataattcacaaaggttccctataaaaaatctccggaagcaacaacacacttccggagtttatttaaactagttcaattcaatttgttttaaaatcgtattttacttgagacaaatctctattcgcatcgacaatctttttcttcaacgattctttaaaatcaaccatcttcacttttaaagcagcatcgcctacagctaaaatctgtacagctaaaatccccgcattcatagctccattaatagcaacagttgcaacaggtataccaggaggcatttgtgcaattgcaagcaaagcatccattccgctcaacgaagaatttattggtacgccaattacagggactggtgtcatagctgcaataactccaggtaaatgcgcagccattcctgctcctgcaataataacttcaataccgcgctctgcagcatttttagcaaaatcttccacttcagccggagttcggtgtgcagataaagcattcatctcaaaaggaatacccatatcgttcaacacttttgcggccttctccatcacaggcaagtcagaagtgcttcccataataatacttactcttggattcatctattaatatttttagtcattctatttatatacatatatatggtacaaaaataaatataatccggctttacaccccatatatctgctaaaaatattacttttgtcttataattaaacacaaagtctccacgacaatgaaaaatattactttactagacaaagagtttcgtccattaatcgaagcagaaaaaatcgacttggcaattagcaatatggcagctagcatgaataaagatttagacggcgaagctccattgtttttaagcatcttgaacggatcatttatgttcacgtctgatcttattaaacaaataactatacccggaacacaaatcagttttataaaagttgcctcttatagcggaaccaattcaactggcgaagtaaaagaattgattggattaaaagaggatatacaaggacgcacagttgttattcttgaagatatcattgattccggacgttcgatgacacatttgttagaatatttacgtaataaaaatccacgaaaagttgtagtggcaacacttttccataaaccgaaagctgccatttttaaggtacccattgactatgtcggtattactcttgaaaatgatttcattgttggccgaggacttgattacgaaggattgggtcgtaatttccctgatctttatatattgaactcctaattgttcaaaatatcacataaataatataataataaataatatagaattatggcttctacgaattttgttgattatgtaaaaactttctgtcgcagtggcgcaggaggacgcggatcagcacaccttcatcgtgacaaacgcaccatgaaaggaggacctgatggaggagacggaggacgtggcggacatgttattatccgtggaaaccgaaattactggacattaatacatttaaaataccaacgccacgtatttgccggagacggaggtaatggcagtgaaaatcggagcactggagcagacggagaagatgttaccatagaggttccactaggaactgtcgcccgcgatgctgaaacgggagaaaccatttgtgaaatcactgctgatggagaaacatttatccttgtaagaggtggacggggaggattaggcaactggaatttcaaatcaccaaccaatcagacacctcgctttgcacaacctggagaaccacgcattgaacgtactgttattcttgaattaaaggtattagctgatgttggattagttggttttccaaatgccggaaaatcgacactattatcggtagtctctgctgcaaaaccagaaatagccaactatccatttacaacgctcgttcctaatttgggcattgtaaactatcgagatgggcgttcctttgttatggctgatattccaggaataattgagggagccagccaaggtaaaggtttaggaatacgttttctaagacacatcgaacgcaattccgtactactctttttagttccatctgatagcgaaaatattcaccaagaatacaatattctattgaatgaattaaaacaatacaatccggagttactagataaaaaaagaattttagctatttccaaatgtgactatgccgacaaagaactaatggctgaaatggaaaacgatttacctgatattccttatgtgtttatatcatctgtagcaggaaccggcataacagaactcaaagatattctttggaaagtattaaatgaataataaaaacggggaatttgaaactccccgttttttgtatctcattgaataaaaagactaccatttgataactctaggaatactttcccttcatacttctcattaccaacaaactttgttcctatcgttatgttacgctcagatgttgggcgttcatcaagcacccatccctgaggcaaattaatttttaaagatttattgtgcttcacttccaattggtagcctgcattattcgcaaaagacaatcctacttttgtaaatgagccctttaagcaaagctcagaaaataaagattgtatattccgaatattcatctctcccattttcatttccatatcaaggaaattggctaaatcttgcatctcatattttgtaaaagaagaacttccagtcaaatcctcaatatcacccaatttaatagttccaccggaagaacggatatttagtttatcaatcgatgccaaatctccagaacatgagttagtcgtcaaacgaacatcttccccttcgcccaatataatagaacaatctttaaaatcgcccgtcattgtctctacctgttcaacattaaaactaccttttgactgtttgatataaaattctcctcccttcaaggtggctgctttaaaatcaccattttgcacatcaacatttaatactccctcaaagtttcccaaaaaaactgcaccattagaattgattatgcgcaattttactcctttaggtaaagatactctataatcgaccttaactgtaagtccagacataaactgcttaaatgccatatctttaccatatgaggtctttaaatcaaggtaatttcccgtacgagtttccaacacttggatcaaatccatagtttcatcagctttggctgcagatttcgcggtcaccttcatattagcataaacatgaatctcatccccacttgtctgcacaacttcaatcttcccataattatttgtcaatacaacctcctctattcccgttttaggaaaacgtttttcatactccttttgacactcttgtgcattcaactctgtaaatactgccaacaggcaacacattaagataaaaatcgacctcataaaataatagtttataacttactcaaaacctattttttcctcttcttccatttgcttatatctgacagacaaatatgctatcattttactaaaagattccatagcagtagccgtttctggattgatttccttcttctgcaaacgaagcaataaatttccataaagtccattcattgctaattctacatctgaaatttcattaccagcctccgctttacgacgaaattccactaaattaccggctgccattgtcactagttgttgatagcgttgatcatgtgctttatgcaacaaaaaaaagtgcaattctgtcagctcatccattgtattctttaatgcctgaatatgtccatttttctcaactttctcttttttcatgatagcaattaaattatcataccaatcatgaatttcgcaagtagtatgttcatcaacttgaaaaccagaaacaatatagcgatctaccagttctatattcaagtttaatgcccgtaacatatcctcaatctgccacatatataaaatatactcggcaatattagtcttttttttggcgcgcgcaattaacacgtttgttgttttttaaataaaaaaattaaaagtcttcatcatctccagacttcagcctgtctatcattcttctgtctttcttcgttggacgccctaatccccttggacgatattcaaagccataagcctttacagcattcaacaaagctaatgtctctggaggcgttacatcttcaacaaaatcaacagccaactgagcagacattcgttttatagtaagctgctttaccaaataatgtctttctattggcggaactctgaccttcacaacctcccctcctttcaattcacgagaaggctttacatgcacatctccgattgacacatgtcccttattacactcctctgcagccagagaacgtgttttaaatattctgacagcccaaagccacttatcaattctcaccttttcttccgccatattctctcagaattactttttattagtattataagtattcattgttcttgctataccctgcagaacaaaactagtgatgatttctcctcctcgtttcaatagctctggcaacgcctcttgttcagcagcatcccaagttcctaatacataatcaacctgctgtcccttcagaaaatcatttccaataccataacgcaaacgagcatatcctgtagtattcaaaagggcattaatgttttttaaaccattatgtccaccatcactcccttgtccacgcaatcgaagagtaccaaagggcaaagccaagtcgtccacaattatcaataaatcctcaaggactattttctctttctgcatccaataactcaccgctttgccactcaagttcatatacgtattgggttttaataaaattaaagtccttcctttaatcttcacctcacatactgctccataacgcttatcttcaaaaatagcattggacgccttagcaaaggcgtccaacacactaaatccgatattatgtcgcgtatcctggtattccgggccgatattacctaaccctacaataagatacttcataaattctcaattattttgcttcctgagcagcagcacgagcagcacgagtcaacttaatctgcgctattactacttctttcgcatttacaatttcaaagttatcaaacgacaaatctttaactttcactgatttacccaaacctaagtttgtaacatcaatgtcgatttcacccggtaagtttgcaggaatagctcttactttcagttttctaacaaccaatgacaatttaccaccggcttgaacaccttctgcaaatccatgcaatttaacaggaacttccattacaacaggtttatcttcagcaatctgatagaaatccatatgcaacacacgatcgctaaccggatggaattgaatttcacgcataacagcttcataagcagttccgttgattgtcaatttcacgatatacacaatcggagtgtacaacaatttctgcaaatctttctctacaactgcaaaatgtacattttcttttccaccataaaggacacaaggtactttaccttctgcacgcagagcattagttgctttttttcctaaatcagttcttaattctccctgtaattcaaaaacttgcatatcaaattcttttttgtgctactcaaaaacaagctttaactccggggatctaagccaacttgttttcccatcacacgattataaatattccccgtaatttgggtcacaaagataacaattatatttcgaaaatcactcacaacaaaatatattttaaatacatgcatcatttactctatatttagaaagaaaaatctctgaaaaagttttttctttcaaatattggttatatttttgtcgcattattaatcaataaaactataaacaatggcttacgtaatatctgatgactgtatcgcttgcggttcatgcgaaggagaatgcccagtaggtgcaatttctatgggtgctgaacactatgaaatcgatgctaatgcttgtactgaatgcggaacttgtgctgcacaatgcccggttgaagctatcaaacaggcttaagataatagcatgcaaaaaaattcaaacggggttatagaccccgttttttatttttatcctatacttcctcaatttttccacaaataacagacatagtttataaatcatttctatatttgcctctatagataaatgactatatgtctgaagcacgtaataccatattaaaacaattatattgcagactcaagcatgaattatgcgcatatgccaaacgctactgtcctcatgacgcagaagatatggtacatcaagcatttgtaaactgctatgaccatcttaaagcaaatgaatcagaagcatctcaacggtcatatctatataatacagttaaaaatctatgtttaaactttctacgcaaccaaaaacctgtatacactgaagtaactactgaagtttattcgcaaatgactatcgttgatacccatgattatatatacgaatatattgaccaattaccactccaagaacgcaaaatattaacgctaacccttcaaggctactcgattgaagatatttccaacaaacttaatatgaatcttaacacagtaaaatactataaaaaagaggcctatgctaaaattagaaacgctctaaataatgatttataagcccctcttcgtacttatttaccactaaccaccaccttatccatctttacatcatgcacttctgtcggcacattttcaataaattggaaatcaaaacacacccctattttataagcattcgtctgtttcagaatcttgtcatagtagcctttaccgcgtcccaaacgattaccataagcatcaaaggcaactccaggaactaatataacatctatcttatccaaatcttcaaaaagtgctcctacaggttccggtattgcatatccttctcctggttcgagcttctcttctccatcaaaataacgaatatccagctcattcccccgtacacaaggcaacaaaaatgtctttttatctgcccaacgggtcacaaagtcatgagtaaacacttcatcgtccattgaccaataagccaaaacaattgcagcctctaaaaatcgtttatcgttctctatctgattccaaacagaaacagacatccgcttcttttcatctaaagaatactgtttcttcaattctcggattcctctacgaatttctttcttatccatagtacttatatcattaaatttgtaagcacaattgtacagttcacggttattttctatatttttgttttgcaaagataagctaaatagaaaatttcaacataaaagaatagaaaattatgagaatagctatacctcaaataaattataaagcaggagatgtggcttcaaacacagcaaaaataatcgcagccattcgaaaagctcaaaatgaaaaagcagaactcacaatttttcccgaattagccatttgtggagcaattcctcaagattggctggaaagagaagattttatcaacacttgccggctagcgatagaaaaaatcgctcttgaatgtactacaatagctgcaattatcggtggaccgaatttggatacaaccaacggtatcatgtacaactctgcttactttattcaaaatggagaagtcgttgacggagttcataaaaatatattaagcgactacgacgtattcaacgaaagccgctatttcatagctggtgaggataattccacaatcagatataaaaatcagaacatccgcattatttttgatgaatacgaatccgaattcatcgataaaaacgatagttttgttgtcatgatgggcatgacaccttttaccattgagagcagagctgatcgtcaccatatcctttcaacgctcgctcaaaaatatagcaaaaacataattgcagtaaatcatttcggaggatatacctccgtactattcgacggtaactgtactgcttataattataaaggcaaattagttgcgcaactaaaagaatttgacgaagactttcaaatcatcgatacgaacaaattaggatccttacctacaataccatttcatcaaaaagaaaagatagcacttatacatgaagcactatgttttggaatcaaagattattttggaaaacatggcttcaagaaagctattctgggactttctggaggtatagattctgcagttgttgcagctctagctgcagaagcactgggggctgacaatgtaatgggattgttaatgccttcccgctactctactgatcattcaatatcagatgctgaagccttagcacaaaacctacaaattccatatgcaacgatcgcaatcaaagacatctatgatcagtatctaaacgcacttcagccattgttcaaagaccaaccattcaacgtagcagaagaaaatcttcaagcaagaacacgcggaatgttagtcatggccatgtcaaataaatatggatacattgcgctaaacacgtctaacaaaagcgaagcatccgtaggctacggtactttatacggagatctatgcggctcacttggttcattaggtgatgtatataaaacagaagtgtacgaattggcaaattatatcaaccgagaacgagaaatcataccagaaaacaccatcacaaaagctccctccgcagaactacgtcctgatcaaaaagatcaagactctcttccagaatacaaacaactagacgccattttaaaactatatattgaagaaaatgcatcaagcgaaagtatcatcaaacagggatatcccaaagaaattgtcgataaagtaatcagcatggttcaacgtaacgactacaaacgagcacaatgcccccctattataaaaatatcaaaaaaagcatttggaagcggtagaaaatttccattctaacatatataacccccaaaggagatgcatgcatatgacacatctctttgggggtttatcgccacacaaatctgttcatattcttcaagttacaatttcatgaaaacttctataaaactactactatagcacaaaaaaagagagagtcacgttatagtaactctctcttgaaattcggcgccaacctactctcccacctttcggcagtaccatcggcactcaagggcttaacttctctgttcggaatgggaagaggtggatcccctcggttatagacaccttttaatttcttcaatatttataatctcttggcagtccgtatatattttgactcttcaggaaagaaaccaactaaaatatactccacttaaagtaaactttcgggtgattagtattgctcggctatgccatcactgactgtacacctgcaacctatcgacgttgtcatctacaacgaccctgtaaggatatctaatcttgaagctggcttcgcgcttagatgctttcagcgcttatccaatccatacatagctactcagcagtgcatctggcgacacaactgattcaccagaggtatgtccaacccggtcctctcgtactagagtcagagctcctcaaatatcctgcgcccacaacagatagggaccgaactgtctcacgacgttctgaacccagctcgcgtgccactttaatcggcgaacagccgaacccttgggaccttctccagccccaggatgtgacgagccgacatcgaggtgccaaaccgctccgtcgatatgagctcttgggagcgatcagcctgttatccccggagtaccttttatcctttgagcgatggcccttccatgcggaaccaccggatcactatgctctagtttcctacctggtcgacttgtcagtctcgcagtcaagcacccttatgccattgcactctacagacgattaccaaacgtcttgagggcaccttgagaagcctccgttactcttttggaggcgaccaccccagtcaaactacccaccatgcaatgtctccctaacgggattagacctcagataacagaagggtcgtatttcaacgacggctccataatgcctgacgacaccatctctcagcctccgacctatcctacacatctattacccaaaatcaatgcaaagctgcagtaaaggttcacggggtctttccgtcccgttgcgggtatccggcatcttcaccggaactacaatttcaccgagctcatggttgagacagtacccagatcgttacaccattcgtgcaggtcggaacttacccgacaaggaatttcgctaccttaggaccgttatagttacggccgccgtttactggggcttcaattcaaaccttcgtattgctactgagctctcctcttaaccttccagcaccgggcaggtgtcaggccatatacatcatcttgcgatttagcatagccatgtgtttttggtaaacagtcgcctgggcctattatctgcggctctattgctagagcgccctttatcccgaagttacagggccattttgcctagttccttaaccatgaatctctcgagcgcctgagtatcttctacccgatcacgtgtgtccgtttacagtacggataatcataacctgaagcttagcaggttttcttggtagttaatttacctacattattcgcgcagccgaagccttacgatactatcacctttcacctctagatacgtacttcactatatctatctctgggtacgggcttcaaccacctattccgtcaggtggcagtagtgtcatctctacgtcactgcatcgcagttatgattagtacaggaatattaacctgtttgccatcggtgtcaccgttcggttgaaccttaggttccgacttacccccgggtgattgacattgccggggaatccttgatctttcggcgtggagggttctcacctccattatcgttacttatgcctacatttgcttttccatacgctccaccatacctcacgatacggcttctaagccgaatggaatgctctcctaccgatgtattatacatacatcccatagcttcggttgtatacttatgcccgcgtattatccatgcaggaccgctcgactagtgagctgttacgcactctttaaatgaatggctgcttccaagccaacatcctagctgtctaagcagtcccaccgcgttttctcaacttagcatacaattggggaccttagctgatggtctgagttcttcctctttcgtccgtggaccttagcacccacgggctcactccctgtcttcatgtcttcgcattcggagtttggccggatttgataggcggtgaagccctcgcatccaatcagtagctctacctcgaagacaaaacaacagaggctgcacctaaatgcatttcggagagtacgagctatttcccagtttgattggcctttcacccctacccacaagtcatccgaaaacttttcaacgtttaccggttcggccctccagtttgtgttaccaaaccttcagcctgctcatgggtagatcactaaggtttcgcgtctaccgccactgacttcacgccctattcagactcgctttcgcttcggcttacgcacctgaagtgcttaacctcgccagtgacgagtaactcgtaggctcattatgcaaaaggcacgccgtcaccccacaaaggggctccgacagcttgtaagcgtatgggttcagggactatttcactcttctgttcgaagtgcttttcacctttccttcacagtacttgttcactatcggtctctcaggagtatttagccttaccggatggtcccggtcaattcggtcaggattcctcgtgtcccgacttactcaggataccactatgccgcataatattacgtgtacggggctgtcaccctatattgccgcactttccagtacgttccacttctattattttgacaataacgtggtcctattaccccgctgatgccgaaacatcaacggtttgggctgttccccggtcgctcgccactactgggggaatcacgtttgttttcttctcctacaggtacttagatgtttcagttccctgcgtttgcctaccttacggtataatacatcttcaatgtattgggttatcccattcggaaatccgcgcgtcaacggttatttgcacctatacgcggcttatcgcagcttatcacgtccttcatcgcctctgagagccaaggcatccaccatacgcccttgcttatttactttaattcatgcttactcgttattcacagtctttcgactattacttatctcgttgctcgttgtacatacttacatatgcacaatctgttgtggattatattctaatcgtttctttccaaaatgtcaaagaactgcgtacccctaacggtactgggtggagaataagggagtcgaacccttgacctcctgcgtgcaaagcaggcgctctagccaactgagctaatcccccaggtgtagtccctcgcggagttgaaccgcggacctctacattatcagtgtagcgctctaaccaactgagctaagagactgggttaaatgccccgcatttattttcaaagatttgttccagcaagtacgattcataataaccggtactccagaaaggaggtgttccagccgcaccttccggtacggctaccttgttacgacttagccccagttaccagttttgccctaggccgatcctcgcggttacggacttcaggcacccccggcttccatggcttgacgggcggtgtgtacaaggcccgggaacgtattcaccgcgccatggctgatgcgcgattactagcgaatccaacttcatggagtcgggttacagactccaatccgaactacgaccggctttcgagattcgcatcccatcgctgggtagctgccctctgtaccggccattgtaacacgtgtgtagccctgggtgtaagggccgtgctgatttgacgtcatccccgccttcctctcaccttacggtggcagtcccgccagagtgcccagcatcactgatggcaactaacggtaagggttgcgctcgttatgggacttaacccgacacctcacggcacgagctgacgacaaccatgcagcaccttgaaaatagctccgaagagaataactgtttcctgttacgtccatctccatttaaacccaggtaaggttcctcgcgtatcatcgaattaaaccacatgttcctccgcttgtgcgggcccccgtcaattcctttgagtttcatcgttgccgacgtactccccaggtggctcacttaatactttcgcttaatcccgtactgtatgtcgcacagaaccagtgagcatcgtttacggcgtggactaccagggtatctaatcctgttcgctacccacgctctcgtgcttcagcgtcagtcacagtctggtaagctgccttcgctatcggagttctaagttatatctaagcatttcaccgctacttaacttattccgcctacctcgtctgtactcaagctgaccagtattaatggctggccaaggtttagccatgacattttaccactaacttaatcaaccgcctacgcaccctttaaacccaataaatccggataacgctcgcatcctccgtattaccgcggctgctggcacggagttagccgatgcttattcattcggtacaggcatcgtcccactcgtgaaacttattcttcccgaataaaagaggtttacaacccatagggcagtcttccctcacgcgacttggctggttcagccttccggccattgaccaatattcctcactgctgcctcccgtaggagtttggaccgtgtctcagttccaatgtgggggaccttcctctcagaacccctacctatcatcgccttggtgggccgttaccccgccaaccagctaataggacgcatggccatcctttacctccgtagatttaactccattcggatgcccgaataaagtattatgggattttaatccacgtttccatgggctatccccctgtaaagggcaggttccatacgcgttactcacccgtgcgccggtcgccatctgtaattagcaagctaattacaatgctgcccctcgacttgcatgtgttaagcctgtcgctagcgttcatcctgagccaggatcaaactcttcatagtaataaaaactttaaattattttctctttagcccagtcattatccctcggaatttattcctcggactcgcacttgctgtttttcaaacctttcaatatcttaaagaactatctctttctcgtttgtctgtcgctcatttttaggagcgaaagcggatgcaaagataaggagttttgtttgatacttccaaattttttcgcatcttttttttcagaacttgttttcaaaatctcagaaccaatttgaagtctttcgttttgaaagcgggtgcaaaagtaatgcttttgtttttaacttccaaactttttgcaaagtttttttgaagtttttttttcgaagcctttcgccttacaccatcctgaagaactattgctatcagaaactgtctgtaaatcaattcttcaacccctcttacctcctctattgctttaggtgtcatttcctgattgcgggtgcaaagatacacccttttattacctatttccaaattttttgaccacttttttcatgaaaattttaaagtttttcgcaacgtgctgataatctgatatgtataaatgacggtttttgagacattaaatgctcggataacagacatactgctattttactgctgaaatttggtcaaaatcacctatcatgcgctctaaagaatgctattacggactgaaaatgctgcagagtatgcccgtttttactgattttatagatatatccaccataaaactctgccttttctaccatagacaagcctaaactgtcaaacagcaccacaatcatctttctaccggatattaattctctaccttttaagggaacttcggaaaagatttgcagaatctatattgaattgtaaaccgtgaattgatcgttagtagaatatctgcaccaacttggcatacatattacaaagtaacgcctgacgaaaacaaataatatatatataaaacggaccagcttatcttagttggtccgttcatatgattatatattcctcttcagattaaatcattgtactaatcataaatgttgcagctacagcaacaatagcatacaattccggaaatactgccaaaatcaaagttttgccaaatacatcataacctgaaccgatacctataataccattagcacacacctggccctgacgaatagcagaaaaaagacaaaccaaacctaaacccagtccagctccgaatactgccgcagcctgcaaccaagtaatctcaggtaccaatactcctttcaataagaagaatcccaaaaatccatacaatccctgtgtaccaggaagagcacacaataccatataattaccaaaagcttcgtcatttttcttcaaagcaccaattgttgcattaccaccaatggttacaccataagcactaccaattccggataatcccagcattaatcctacaccaatataggctaaaataatctcattcatgattttctattttaaattgtttactactaatatttcattcttataatgaccttttcttgaaaggctgatatttcttacctcctccttcaaatcccgcatttttataaaactcaacaaatgtaagacgcatcgggtggacaaatgagcctaaacctgccataaacagattaacactatgaccaaaaaccaatataaccagcatcagtatctgtttcaaaaccggaatatctccgctcatattcattgccaagtcgttaaacactaatcccaatacagcactggatattcccaatgcaaataaacgtatataagaaagagtatcacccaacaaaccagtcaccatattataggaatcccataaaccggaaccgatattaatgaatacattgcgtcgaatattattgaatacaaatatcaacaagcctgcaacggcaaatacaatatacatcggtatagtcatattatgaccttgactggcaaaccaataacaagctccaccccctaaaataccaactaaccaaccaatggtagaaagcgcagcaggtaagccatattgtttccataaattagccacctttaagaacataccgaaaattatctgtacaacacctatgatcagagccaaattgaacaattgctgagaatcgagcatatacgccttaaattgttctaaccaagcaatcttagcatccaacaaggatactccaaagaaagttccccctacaatacccataatgacagtggaaagtcctaaccactgcgccaaagacaatataggacgaattgcagattgtgctttgattttatataaagtgacaccgagcagaatcaataatccatatccagcatcacctaaacaaaagccaaagaacaaaacaaaaaacggagcaaagaaaggcgtcaaatcaatttccctataattaggcaaagaatacaactcgccaataaactcaaataatctagcaaatttattgtttttcaataatataggtggattatcctcattcgtaggcgcttccaattcataagcaacacctttagcagaaagccaatgatccgtttcggcagcgatactctccggaacccagccctccaatgctatcactttatcatccaacaacacctgagcagcatcctttatttttaaaagatctgtatcctcatacacttctttgcgaacttgagctaaataagccacagaacaagccgccactttgtcaagagtattccctattgtttctttctctactttcaaaagctcgatacgctctcgaatttcttgagcactcaactgcggaaattgcacggcatcagcctccggaactccttctgctccctgtggcattaccgtaacaaaaaacttttgacctttctcttcgttaataataaatgcattgtacttatcttcccattccggcaagtatttacggtctggagccataaaaaagcgcatatcccatcctgcatccaacagaccattaatacgctcttgtggcaaatcaccccaaggctcgtaaattgaactatcttttatcaacgaagcaatctgctggtcaatgtgatccatttgtttaaatctgccttccaaaaaagccaggatatccaaatcactcacattcccctctttttttgtcatatcccccaaatgaaacaagcgatgataaacagctaatttttcatctacagaacaagcactctcccacaagtttacaacttcaccttctgcctctttctgttcattaggaatccgtttagccaataatttacttgtttctacaatccgcttcaatagagcaaacttttgtttcagctcctcatcctcagctgacctttttttattttcatggacatgaaccactcccttttctcgaagctcctcgagaaactcctgataatctttgtagaatatcaacagggataattttcgcataggtactatcatgcttcgtcctccattgctttacgggttttcactattttctgcgccgactttgaaagattctcctcatcttccaagaaccgcttaatcttccgaatagcttcttgaaatcctgggatttgcactttctcatacaaattcaccttctgagtcgtctttttacgggcacgatcaagcagttccattttccgcatatagaattctctttctacggcaatattcaccacttccttaacgtgctgaatcccgtcaaggaaccatcccggtgcattgaacaaactgaaatcctttatttcatattccactttttccaagaccggcgtccgtacacctgctattttcttaacggacatctccacatcttttaccgttaagatatcgggtgtatattcatcgtaaagctgcaacatattattaatggcattgagagtattctccaatttagaatcaaactcatctgccacttcttttgctttcttcacttctgaacgcaacgcagattccttatttttaatggtaggcaaagctcgcaccctcatcttgagctgtttgtcaagactttgaagcgaagttttattatattgaaatttaattgccataccgaatcattattattttatatcgcctccaaattcatccacaatctctttcttgatacctagttcagagcgggtaaaatatttacggaacaacttccaagctgtatccaacatttctgtaacactgatattaacgtcgattgccaacaaatcatttgaataatcacgagcaaaatcaagagtacgtctatcataatccgtcaagtcaaaaccattttccaattttgtacgagcattggcagcatccgcatacagacgtatagcggcattcatcacttgtggatggtctttacgtgtttttttaccgattaccaactgtttcaatcgagacaaacttcggaatggatctacaataaccttacctatttcagtatccttacgcaagaaaagctgtccttccgtaatataaccggtattgtccggtattgcatgagtaatatctccaccagaaagtgtagtcacggcaataattgtaatagaaccaccttgtgggaactgtaccgctttctcataaatcttcgcgaggtctgaataaagcgaacctggcattgaatccttagacgggatctgatccatacggttagacacaatacttaatgcgtcagcatataacgtcatatctgtcaacaataccaaaaccttctcattcctatccacagcaaaatattctgcagcagtcaatgccatatccggaaccagcaaacgctcaacaggaggagcttctgtcgtattcacaaaactgacaatacgatcaagcacaccggcgttgtcaaacagattcttaaaatataaataatcgtcattcgtcaatcccatcccccctaaaataatacggtcagtctgtgcacgcaatgcaacattagccatcacctgattataaggctgatctggatcggcaaaaaacggaattttctgtcctgatactagagtattgtttaagtcaatacctgctattccggttgcaatcaattcagaaggttgtttacgacgcacaggattcaccgaaggtcctccaatctcacgttcttcaccatcaacagcaggtcctccatctatcggatcaccaaatgcattgaaaaaacgtccgcacagatcttctcccaccttcaacgtaggtgcttttcctagaaaagtcacttctgcattggtaggaatgccttccgtacccgagaatacctgcagcgtaatatcatctccccaaatctttactacctgagccaaacgtccgttgacaatcgccaattcatcattaccgacaccttgggcctttagtgaacaggtagctttcgtaatctgagtgatttttgtatatactttttgaaaagctgtattcatttaattatggatttttaattaacctatttctttctctcattgatgattccagtaacctcatcctcaaatttcttgaaattttcagactgatactccgaatagttcatctgcttgaatgcattaataatacgtttgaaataaggattgacctcttcaaatgagtcaaactcaaaatccgaacgcactactcccaacaccatattcaacatatactgctgacgttccatcgatgtagaaccatcaatattatcaaaagcatcctgctgcaaaatcacaaagtcgattaactccgatttccaaaaaatcacatgataatccaatggcacaccatcatctcccagaatatcaatctgctctgcagtttctcgtcctctcaccaacatatttcttgcctcattcacatcagcaatccaggaatcagatatattcttcttcgcataatccacaaattcagggtattccaaatacttcgaatatgaatccaaagtatcaatagccggataacgtttggagtctgcacgagattgagataatgcatagaagcaccgggcaacctttttggttgattctgttacaggttcttttaagttaccaccggcaggtgataccgtaccaataaatgtaacagatcccgttttgccattgttcaaataaaccattcctgcacgtgcatagaagtttgaaataattgcagacaagtccatcgggaaagcatcctgccctggcaactcctccatacgattcgacatttcacgcaaagcctgagcccaacgagatgtagagtctgccaacaacaacaccttcattcccattgcacgataatactcaccgatagtcatcgctgtatatacagaagcctctcgcgcagcaacaggcatattagatgtatttgcgataatagttgttcgctcatacaaagagcgtccagaacgaggatcctgcaactccgggaattctgtaaaaatttccaccacctcattagcacgctcaccacaagcagccataataatcacatctgcatcagcaaaacgggccaatgcatgctgtaacacagtctttccggtaccgaacggtcctggaataaaaccagttcctccttccaacatcggattcattgtatcaatcacacgaactccggtttccatctgacggaaaggacgtggcttgtcaacgtaattacggatagctactttcaccggccacttttgcaccattgtaatattatgctcctgaccatttttatccttcaaaacagcaatggtatccaatatagtatattcaccagccggtactacagaagccactgtgtattctccttcaaatttaaatggcaccataatcttatggtccaaccaattttccttaacgttacctaaccaatcagcagcctttactttatcaccaaccttcgccaatggagtaaagttccatttcttgtcattctccaacggattggtatattctcctcttttcaaaaagactccggtcattttatcaaggtcgttctgtaaaccatcaaaatttttggacaacaaacctggaccgagactaacctcgagcatatgattttgaaattctacaggcattcccggtttcaatccacgggtactttcgaacacctgcacataggcaagatctccaaccacctttatcacctcagccatcaaacgttctttacctgtttcaataaagcaaatctcattttgagaaacaggtccttccactttgacaagcacaagattggaaataatgctatgaacttttccttgtgttttatccataaaagttctaatttaatcatttaaattgttcatcaaactgaaaactcttcctgaacttttcaaccatttccataaatacttttctaccggattccgagctcatcttactccatcgttcgacaatcatcaaacgaagcagatagctaatcacccgttcaaatgaaaaatattcaaaagttatcgcctcatcccaaaagtcccaaataagcaggtcgagtcctcgttcacgctctaccaaatcaggcgaatccatcaacgccatcactttttccacaaaaggataatctaatgaaagaccaaaatccttggcattggatgtccgtaatgcaacagcaaaatcattacttccaatcacctctttagccacctccatgccgtattttcgagcatttacagctgtcaccagattctttagattcatagaatattcagcatactctctcaccagccgattatcagctttcatcatataatcgtagtacatccagctcaatacattcactggcgctacttcgtattttagatgttcttctttaaagtcagcgataaatcctctcagatattccggaatattcctatccggctcgctcacctcatcttccagcactttcaacggatatactgtctgcaatgcgggatccgccccctgccgattaagcaaacgcaacacttgggcattatcgttcggcaaaaagaacaaatccatcatattcttatcctttccactaatataatccttcagttgctcgcgaaattccccaacagtcagcgacagtttccggtcgtcccatgctatctcaggcaatcctgctataaaagcaatataatccatgcagtctatttttatctcacattacttatagagcaaactttttgtaaagcttctcatatattgactaaagaaagattcaaaaagctcttctgaaaaagccacctgataactcccatccttcggacgaaggatgaatacaccatcagctcctccagccttcacttccaatccttgatccaacaattctttatatttggctgccacaaactgctggaactgttccttctccttatcggacaaaataacttccaaatcaagatttccagaagccacgttccatttcttgatgatatccaccaccattccctgaacaaaagcagcatccttaaaggcttcttttgccatttcaccagacactttaccaacaatcagcccggtaatttcctgcttcaatgcagtgatagcctgtcgagcgcttaatgccatttctgacaccgctttctttttcagattttccgcttcagccattgcttcattctgaatatcctttgcttttacctcggcatccgaaatcaagctctccgcttttgctttcgcctcggcaataatcttttcagcttcctgattagctttgcctatcccctcctcgtacagcttcttcgttaatacatctaatttgttttccatatctgaatatagttttgaataattctctttaccattctcaatcaccaaattctagaagttctttgaatttgaaggctccaagttagtctttttgccttaaaaaacaaataaaacctcctatttaaaacacttttttaccaaaaagagaatgcaaccctcaagccaatgctctctaggctgcatttttcaaatatatgatcaattttattattgataatcttctccagtagcccaattacctgcattaatctgctcttgcatatgtttcagccacacttgacggattccagcataatcgcctagaccttttattgtacaagcatcaaccgatccatgatgactttctttttcatttatattatatcccatttttttcaacttcaatctccaacaagcttctccctgcggaactgcttgactaaaatcatctccctcttccagtccccacatatcattatgtgcatgatctcctgcaattgacataagcggtgccaaataaatggtaatatccgatgctttataaccagtagctttttcataagcttttaatttagcatatatgcactcttcacttccttcctcaaagaaaagcatatcaccataatctaccgttcctacaaatacattattctttccggcagtttttagctgcattgctttttccaaattggaatattgatcatttgcatggctataagaatcttccggattaccatgccccataaaaagcacgatattctttgggtccttcaatacatctttataagcatcaaaaagtatgccgccaacaaccttgatatcatcatctgtctccaacaaacaagctcctttagcaacctccactttcggaaacccctcaatcatgaaatcttttttcactttcgtgttcatcagactcaaatattcctcaccaggaatcacatgtaaagactgcacagccaccttcttataacctgcattaccaaaagcagataaccaatctgacggtccgtgacgttcaataccagttgcagtcaaaacccgattaacacaagttgccgaagtgaaagacaagtaaatatcataatcaggaaatgcttttttaaaatcagacatcacagcatcatacgttttaattgattcctgataagtacttccaaatgtacataacagcattgccttgtcgctttttttattggcaacgacacttttttctaccggattagtcgtgttatcatcatcaccatcatcacaagaagtaaaaagtggacaaacaaataacatggccatagccatccaattcatcattttcttcattttgctttaatttttaaattaatactctaagaaaatctcttatcagatctcctttcatttgcgattattttgatattttaatacacacgaaacataaaaggtacgtccaggagaagatgttgaacgatgatagccaaatggagttcgatcaacatagtcaaaaagattatcaacaccaagatgtacatctactttccatcttttacaccccatcaaagagtgacatgtattcaacctccatatttgatgaggtttcgcatctccatcttgaatataatgtctctgcgattgatagcgtccaaacaaactgatagcaagccgataatttttccagatacgcttccattctgctttccatgtggcattatgatatgccgttccatcaataggcaaatatctcatataatctttagaatccggctcatccgtatattgcgctttggcattgttgtaactataaccgccatccatcgacaaagacggcataatatcatacgtcactgtcacatcacatccaaaagtacgtgctttggacaagttttcatatttcatactcccctgcacttcattcaaacgatcttctggagtcgttattgtttctaccaaatcaatcatatcccggatatgattataatacccatttaccataaaccgcaatttctgtatattatattcgatcccgacagatacataatgagatttttgaggcttcaaatcacagttgccatagtaatgtttcaatctaccaccaccaatagttgtgatgtagttatcatacaattctttcaacgtgggagttttgaaccccatagaataccctaagcgaaaaatccaatgttctaatttacacatagccgacaccttgggtgtaagatgtaatccaaactccttatgcccggtcagacgcacaccataagtcaaatttaacagctctgtcatattccactcatcttgcacataagctgccagtgtatatacagatgccacatccccctgaatacggtgaggagatttcaaataatcatactggcattccagtccggtatttaaagtatggtattcccccaataaaaacaccccttggatttttcccaaagtgcgttgctgcgaactttgaagaatatgttctccgggataacgagtaatacgtttcccctcttgcgtataaaaatcagtattttcctgttgggtataatcataataataattataacatccgaaagaaatatccatttttagataattctgatgattcaacgcataacgagctccacccgccacatcaaagttacgatacgattgattataacgataatacttatatggacccgtcaaccgataattccaacgttgatacaaggagccttcagctgacaggtccaagcgacggttagctttataagtgagatattcgttaaaagtataatttgtactccgattaactgttttagtcacagaacctgtccatatttcatggtgatccaattcccggtctgtattccgccacccatctgtgtgcttacattgaaaagttgtagaagagctaaagtatttcccattaatagctaatatattcccctgagagatatcgccatgggcacccacacgcgtcgtattggacacattgattttttctctgtattttttagtaataatattgataactcctgcaattgcgtcagacccatacaacgaagatgcagctcctttaataacttcgattcgctcaatattatcggtattaatcatattcaaatcattttgaccaccgatattaccattcatccgcttaccatttaccaaaatcaaaacatagtcattccccaaaccattcatttgaatatgactgcccatatcattcatattaaatgttatggatggcatcaatccctgcaacatatcctcaatgctacgtccttggtaactcgccaatgccttagcttgaataatctctgtctgtacaggcacatccttaagataatgcactgtgccagtaccagtcacaaccacttcattcagcaataaagaaagctctttttcattcttgtttttcaacacactctgcgcaacaagtgcctgttctataagcacaaataatgcacacagccaatatttgcatttcatttatctgttaaatttttgtttattcaacataaaaatcaaactgcacgtagcttcaaaaagatatacacctatttcataaaatataagtgactatgcctctattcctggaagctacgtactcacaattgtgataactggcaggtcttctggctttcctctatctgtataccttcccgttgtctttcaaacaacagtggctctgtagttacagatattttgaaatgaggattacagctgcaggtacagctccggttttacaccggattcccttgcatcaggggaaagaaacttcctctgattaccaatttcagccgcaaatatagaaaacatttatcttgtttatccaaaaaatattgttttaatttgcaactactagtccttacatgctatgcttgatcacaaataccttgtattttgccatttggcccgcaacccaaacaccacccgtgtcgcagaagagctacttctctctcaaccggccatttcaaaaagtataaaagaattagaaaaagaattgggaattactctttttcatcgcattaaaggcagaatgcaaatcacagaagccgggagatatctctatgaagaaacagaagcaatactgaaacaagaacgcaaaatacaattcaaactagaccaaatacgaggaaattttcaagggattcttcgtttaggagccagcacaacgttatcccaatacatcctcccttcaatattagcacgctttaacaatcaacatacagggatttccatagatctcataagcggcaatacacaacaaatcgaacaagcaatactaaatgacgaacttcatctagccttcattgaaggaacaccttcacaaccagacattcattacatacctttcttaaaagatgaaatagtattagtatgtgcggccaatagtaatattccggaaacaataaacaaagaagaattgagcaattacaattttgttttccgggaaaaaggatcaggaacttaccacgttataaaaaaaacaattagcagcatccaatattcccattaacaccctaaatgcccaactgattttaggaacaactgaaggcattaaacagtatattcaatattctgactgcctggcatttctttccatacatagcatataccaagagcttaaagataaacaattacgcatcattgaaacccaaggacttagcatcgaacgagtatttcatgccattcatcgtcaaggagagcccgacccatatgctcaaagatttttaaatttcacacttaatattaaaaatacagaccaatatctcaaacaaatcaaacactaaaccaaccacattaccttcattctctctgatatgaatttattaaagatatctgatgaagtttcgcttttactaattttcatcgtatcttcgcatcctcattaaaagaaaaaatcatgaatacattaatactattggcagaaacagcaacaaacgaaccaggtctaagcatttggggcatgattgtgaagggcggatggctgatgattcccattttcgcattatctattattgccgtctatattttctttgaacgctatttactgctccgacattatatcaaaaagaataaagaatttattgcaaaaataaaagagcatatgcttaccggcaattctcgggcagctataaatctttgtaaagaagaaaacacgcccatgtcacgaatcctcataaaaggaattatacacaaacaactgccagcaaatgaactacgttctgtcattgaaaacgcagccaaccttgaggtatctaatatggaaaagggattaagtaccttggctacatgttccggaatggctccaatgattggatttttaggaactgtagtaggaatggtacaagccttctatgatatggctctagctggcagcaatattaacatcaccctgttatctcgcggtatttacacagccatgattaccactgttgccggattgattgtcggaattattgcttactttgcttacaataccctcactatgattattgaccggattgtaaataatatggaaagcactctttctgattatatggaaatcacatacgatatcagaaatgatcaaaaacaataaaaccatcagaccatgataaaacgagcaagaaaggctaatccaaatttcaatatgtcgtcaatgaccgacattgttttcctattgttgatttttttcatggtaacatcaactctcatcaaccccaatgctctcaaactgctattacctaaaagcacaaatcaaacttccaaccaaccaactgcggttgtctcaatagataaaaaacagactttctacttgaatcacaaggtaacacccttctctcagctagaaagcaaaatcgttgatatattaaaaaacagcgaagatccatgtgtttccattgaagcagaaaaatcggtaccgattgaacaagttgtgcgcgttatgaatattgccaaaacgtatggttacaaagccattttagccacagacccagaataaaagatcaaatcatcaaatttttaattacaaactctacaaaaccatcttctctgtcggatgctacggttttatacaacgcttttaactgtacaggagcattcgacacaacagcggcatgcccacaaatatccaaaaaatccacatcattataatcgttacctaaaccgacacaatttgcacaatcaatccccaaccattccaataaattacgacaagcagttcctttatttacacccttagcaaagatctccaaccagatggcgcggttatctagaggagatgttgtacgcacaatagaatagccggccagctgcatacggatatcttctatcagacgcaattgcactgcatccaaaatcataacaaactgcgtaatctctccatgtatctcttccggtgaagatatcggaataccaaacatcttatatgtttccaaacgacgaagatagtcagaatgctgcggataatgctctgtataataatagtaatgattattaggaatttctcgttgaactgtaaaatttatgctaaaatcccacaaataacgagcaatttcatgcgcatctttttcagataaatgatatgcagacagtatcttcttatccctccaacgcatcacaccagcaccagatgcaaaaacaagataatcaataggaaagtcatcagccaatacttgccttgcagaataaagattcctccctgttgcgataatccggacatttccactcttgccgatacgttgaaatgcatctaatacagcaccactaatccgacctccacgaggcaaaatcgtaccatccaaatctgttataactacacttttgctcatttaaatgtacctaataattcatacgtaaaataaggtaatgactcaactaaatagtgcaacactttttcctgattcattccgtcaagcggattatggtcgcatccaaaggtcgcatgaatacccatattaataaaatgtaccgcacgttcaatcgcttcaggtaaactgtcatcatgcaacaaacagcctgtaataacgctggcaaaagcatctccagtaccaggataagatgcaggtaaatacttactacacacacgccataaacgaccatccaaacgattataagcaagtgtagctatctgattctgcccgccaacaggagcagaagttataatactgtaatcgggccccaactctcccaactccacacaccactcgatagcctctcgctcttgaacttcagtccgcagcttatgtcctaacaacagagcagcttccgtcagattaggagttattactttagctctaccacataaacgacgcattccttcaatcattttctgctccatattaggatacagttgtccatggtctcccaatactggatccaccaaaacaaagttatcatcctttttaaagtcgcaaaaaaattgttcaacaatatccaattgccgctcagaagccaaatagcccgaatacaaggcatcaaaatgcaaatgcaactctttccagtggtcaataattggctgcatctgctcagtcaagtcaaaactacgaaaattctgatactcgctatgagcagataatatagctgtaggcaatggacaaacctgataacccatatatgacaatataggaatagcgacagtcaaagaagctcgaccatatccggaaagatcatgaatagctgctattttcttcataaaaaaaaggttttatgcatgcaaaggtataattaatttccactaaacacatattttccccatctgacacccaatacacaaaaataaatatcatcacccataaaaatatgaggtatatttctaaaaacacaccatatttcacactataccccctcaaaaatatataccaacaacaaaaaatcagatatattttcatacatttgccttataaattactcacataaacaatactaatatttatggcaaaaatcagattttctgctcttaaagaattaaccgatcgtattccaattcgatctaccatacctggtcgggtatcagaaattttcggttgcgatgtactaaccatcgaaaaaatgcgtcaatacttatcaactgaagcctttaaacaattagagaaaaaaatgcaaaatggagaatccatcgaccgcagcctggctgaccaaattgcagctgcaatgaaagcatgggccatctctaaaggggcaacacattacacccattggttccatcctctaaatggttcaacagcagaaaaacatgatagttttattgatattcaaagcaatgggtctgtcattgaagtatttgacggacgaatgcttgtacaacaagaaccggatgcatctagttttcccaatggagggatacgcaatacatttgaagctcgtggatacaccgcttgggatcccggatccccagcctttattaacaacaataccctttgtatcccaactgttttcgtcgcctacaccggagaagcactagactataaaactcctatgcttaaagcacttgctctcattgataaagctgcagtagatatttgccaatattttgataaagacatacaaaaagttacggcaacactaggttgggaacaagaatattttctggtagatgaagctttatttaatgcccgtcctgacctaaaactttgtggacgtacattaatgggacactcttctgctaaagaccaacagctagaagatcattactttggtgctattccagaacgggtcaatgcctttatggatgaactggagtacgaatgtcaccgccttggcataccagtaaaaacaagacataatgaagtcgctccaaatcaatatgaactagcacccatttttgaagaagcaaatcttgcagtagatcacaaccaactgcttatgtctaccatgaagcgtatcgcaaaacatcataaattcagagtattactacatgaaaaaccattcaaaggcataaatggttctggcaaacataacaactggtctctcttgaccaacaccggagtcaatttattatcaccaggtaaaaatccaaaatcaaacacccaatttttggtttttcttgtagcaacggtaaaagctgttttagaacaagaagctctttttaaagcttgtattgtatccttgggaaatgagcgacgcttaggtggtgacgaagcccctcccgtaattatgtctgtatttcttggtcagcaattagatgcaatcctcgacgaaatcgaacaaaaagtaagtagtcgaaaaatgagtccagatgaaaaaacggagttaaaattaaatgtcgggaaaattcctgaaatcatgcgtgataatacagaccgcaacagaacatcaccattcgcctttacaggcaaccgatttgaatttcgtgcggtaggctcctcagccaattgcggaggagcaatgattgttcttaatactgctgttgcagaacaattaattgctttcaaacaagaaacggatattttaattgaaaaaggagtaaaaaaagacgaagcaattttccaaactctccgtcaatacatcatcacctgcaaaaaaatccgctttgaaggaaatgggtacagtcaagaatggcaaactgaagctgcacgccgaggactatctgttgaaagtgattgcataagtgcgctacgagcttatctatcgcctaaagctcgacaattatttgtcaaaaatggtatatttacagaacgagaacttgaggcccgatacgaaattaaaaatgagatatacttaaaaaaattacaaatagaatcccgtgttttgggagatttggcgcttaatcacattattccaacagctatcaactaccaaaacactttaatcatgaatgtcaaaggattaaaagatatttttcctcagcagtatatggataattgcgaaatacaattaaaagctattacagaaatctcagaccgaatcaaagagatcaggacgttagttgatgacatgacaaaatcccgtaaggtagccaacaacaccatacctcatattgtagagcgtgcaacagcatatgcacaaacagtgcttccctatctggaccgtatccgctatcatattgataaattagaattaatcgtagatgatgaaatatggcctttgcctaagtaccgagagttactatttttcaaataaacaaattcttccaaaacaaaagagagattggcttttagctaatctctcttttacatattaaataaaaattatatcaacaaacgtcatattctgccaatagtctcatcatatcttgctgcaatttacgtgcttcctctgctgcacgctctgcaaaatgctctgtcttatccgcaaaaataattccacgagaagaattaacaatcaagccgcaatgagaattcattccatattttgcaacttcctccaaacttccaccttgagcaccaactccgggtacaagcaagaaatgatccggtacaattttccgaataccttctaacatttcagccttggttgcaccaacaacatacatcatattttgcttatctccccattcttgtgattttttcaaaaccttctcataaagtttttcgcccgaattctcaaagaattgaaaatcaaaagctcctttgtttgatgttaaagccaataaaatgacccatttacccggatattgcaaaaaaggagttacagaatcttcgcccatataaggagcaacagtaatggaatcaaaatccaaagtttccaaaaaagctttagcatacatctgagaagtattaccaatatcgccacgcttagcatccgctatagtaaaaatgtccggataattagtctttatatatttcactgtattctccaaagatttccaccctgccaaaccacgactctcataaaaagcaatattcggtttgtaagcaatggcaacttccgctgttgcatctataatagctttattaaactcaaaaacaggatcctctgcagtcaataagtgttgaggtatttttgcaatatcagaatccaaaccaacacacaaaaaagattttttcttttttatttgctcaaataattgattgtaatctatcataacttcaaatattacttattattacattataaaccactagcttttaagcgttcggtattctcttctatctgcaacttttcaatcacttcatccaagtcaccatccaatacagcttgaagattataaagcgttaacccaatgcgatgatctgtaacacgaccttgcggataattataggtacggatttttgcagaacggtcacctgtactaaccattgttttacgcttggcagaaatatcatctagatatttctgatgttctttatcatatataaatgaacgcaaacgagccaatgcacgctctttatttttcggttggtctcgcgtttccgtacattcaatcaagatttcctcagaaactcctgtattcggatttttccacatataccgcaaacgaactcccgattccactttgtttacattctgtcctccagcacctcctgacctaaaagtatcccattttatttcgccctcattaatttgcacatcaaactcctctgcctcaggcaatacagcaacggtagctgctgatgtatgaacacgtccttgtgtttccgtttcaggcactcgctgaacacgatgcaccccggattcatatttcaatataccatatacaccattccccgaaacgctggcaacaatttctttgtatccacctgcagtcccttcattaaagctggaaatatccaaccgccaaccttttttctcacaaaatttagcgtacatacgaaacaaatccccagcaaacaagcatgcttcatctccacctgttcctcctcggatctccaatattgcattcttactatcctcgggatctgccgggataagcaacatttttatatcttgctccatctgaggtaacttgtccgataattcagcaacctccatttctgccatttcgcgcaactctttatcatcttccatttcaagaatttcacgagactcttccaaggtacgcaaggctaatttatacttatcagcagccgcaacaatttcttctaaatctttgtattccttagtcagtcgcacatagcgtttcatatcctgaatcacttcagggtcagttatcaactgtccgatttcattgaatcggatataaaaagtttctaatttctctaacagtgaattgtccatctactacgctttataatacggatgcaaaaatagataattatttgtattacataaaaagaatacagacaatagtttatagcaaaatgtattccaacataactttgtctaatcaagtatattcatcgcctcgggtatatgcgttattgtgttattctcgccggaaacaataatcaaatcaaaacgaagttccatatctgatttttgcattttgacgtaagcatctgcagctcttagcagatttctacgtttttgccaagtcagcaactcacttggaatttcatcttcagcaagacgtgtttttacttctactattaccaacaaatcttctatactacaaattatatctacttctaaatgcttaaaacgccaattacgctctaaaatagtataccctctctccatcaaataacggacagccatatcctcgccttgccgccccaattcattatgctttgccatagcgataatacttctatgattttacaaattctctatcccccaatatacaaaaaaaatcatatgcgaaaataatgaatattctaatggaatattttaattttcagcactcttttgaattttagacaaaaatgactacctttgtattgttattgggaaatgtagttatggctaagaaaaaaattctttttatatctcaagagattatgccttatctacctgaaacggaaatggcacatataggtcgctatctacctcagggtattcaagataaaggcaaggaaatcagaacattcatgccaagatacggatgcattaatgaaagacggaatcaacttcacgaagttattcgtttgtctggtatgaatcttattatcaacgataccgaccatcctctgattattaaagttgcttctatacaagcagcaaggatgcaggtatattttatagataatgaagactattttcagcgaaaacatattgttgccgatgaaaatggaaacttttttgatgacaatgatgaacgtgcaatcttttttgcaaggggagtatttgaaacagtaaagaaattaagatgggcacctgatttaatttattgtcagggatggattacatcattagttccactttatttgaaaaaagaatacagtgaggatcctatgtttgcacattcaaaagttgtatactctacatacaacgaccaattcaaaggtaatttacataaagacttctctaaaaaattacttagcgaaaatataaaagctaaagacgtcagtattgtaaaagaaccgacacatactaatgttaataaactggcatttgactattctgacggcattatattcaatagtcaggatgttgacccggaattaaaagcatatgcaaataaaagcggcaaaccgacaactgaatatacaactccggaagaatacatagatatctatgatcagttctttgataaaattttaaatgagccaacaggcaaaaaatgatagagatacctatcctttatttataaagacgttaattaaagattaacgtcttttttattactcaaacgacacccataaaacaaaattaagcgagatccatatgaatctcgcttaattatttattttatgatttgatcaagttaattgttcttctgcattttctccatatcctccttcgaaccaacaaccaaacctctcaactccttcataccggttccaacaggaatcaagtgtccacagataacattctctttcaaaccttccaatgggtctaccttgccataaatcgctgcttcattcaacaccttcgttgtttcctggaaagatgctgcagaaatgaaactagatgtctgcaatgcagcacgggtaataccttgaagaacctgagccgaagttgcaggaacagcatcgcgtgcctctactgtcttcaaatcacgacgtttcaattgtgaattgatatctcgaagagtacgggctgaaatgatctgaccggctttcactctgtctgaatcacccggatccaatactactttcttaccgaacatttcatcgttttcttccatgaactcagtcttgtccaccacttgattctccaagaagcgagtatcacccgaatcctgaatcaataccttacgcatcatctggtgaacaataatttcaaagtgcttgtcattaatcttcacaccctgcatacggtaaacgtcctgtacttcgttgacaatatattcttgaacagcaataggtccttgaatattcaaaatgtcagtcggagtaatagcaccatcagacagcggagtaccggcacgaacatagtcattttcctgtaccaaaatctgcttagacaaagatactaaatacttcttcacttcgccagccttagaagtcactatgatttcacgattaccacgtttaatcttaccataagtaacttcaccatcaatttcagaaacgacagccggattagacgggttacgagcttcgaataactcagttacacgaggcagacctcccgtgatgtcaccagccttacctactgctctcggaatcttaacaattgtgctaccggcaattacctgatcaccttcttttactacaatatgggcacccacaggtaagttgtaactcttaacaacatccccatttgcatccgaaatagtcaaagcaggagcttttgtcttatcgcggaactctgtaattaccttttcacggaaaccggttgtttcatcagactcctctttataggtttcaccttcgattaagttttcagaaccaatacgaccgccgtattctgttataatcaaggcattgaacgggtcccactcacaaagcaaatcattcttgctaacctcttgtccatctttcacaaacagcttggcaccataagggatcgtatgggttatcaagataatattagtattcttatcaacgattctcaactctgtcaaacgacctacaaccacatcacacttctgtccattgtcctgcgtatattcaactgatcgcaactcttcaaattctacgtaaccatcatacttagacttcaatgagttctctgtagaaatattaccagcagtaccacccacgtggaatgtacgcaaagtcaactgtgtacccggctcaccgatagactgagctgcaatagtaccaacagcttcacccatttgaacaatcttgccagtagccaagttacgtccgtaacatttcgcacaaacgcctttcttagcctcacatgtcaatacagagcgaacttctacacgttcaatcggagatttatcaatttgttctgcaatctcttctgttatctcttcgccagccttaaccaacaactcattggtgtgcggatgatatatatcatgaacagatacacgtcccaaaattctttcatacagagaagcaactacttcctcattattcttaatggctgcaatagtaacgccacgcaatgttccgcaatcttcctctgtaattgtaatatcattagccacgtccacaagacgacgagtcaaataaccggcatcagccgttttcaacgcagtatcggccaaacctttacgagcaccgtgggttgaaataaagtactccaatacggacaatccctctttaaagtttgccaaaatcgggttctcgataatctgcccccctgtagctccggatttctgcggcttcgccatcaaaccacgcataccgcccaactgacggatctgctcacgcgaaccacgggctccagagtcaagcatcatgtaaatagagttgaaaccctgatcatcttctgccaactgcttcatcaacgtatttgtcaacttagcattcacatgagtccaaatatcaataatctgattgtaacgttcgttattcgtaataagacccatattatagttggccattacctcttcaacctgattatatccttcctgcaacaaatcactcttttctgccggaacaataacgtcagccaagttaaatgacaaaccgccttcgaatgccatacgataacctaaatccttgatatcatccaagaatttagctgttacatcaacaccacaacgtttaaatacgtcactgataatatcacgcaaagactttttcgtaatcaatgtattaatatacgggaaagtcttaggagtatattgattcaaaataatacgccctacagtcgtttcgatcatgtgggtatactctttaccctcattatctacatcctgaatcttcacttgaaccaaagcatgcaaatcgacagccttttcattcaaagcgataatcacctcctgaggagaatagaacttcaagccctctccttttgcacctttacgaggcttagtaatataatacaagccaagcaccatatcctgtgaaggtacagtaataggcgcaccattagcagggttcaagatattgtgagcacaaagcatcaaaatctgagcttccaaaatagcctcattacccaacggcaagtgaacagccatctggtcaccgtcaaagtcggcattaaatccagtacaagcaagcgggtgcaaacggattgctttaccctcaatcaacttcggctggaacgcctggatacccaaacggtgaagagtcggagcacggttcaataaaaccggatgacctttcaatacgttttcaagaatatcccaaacaaccggatcacgacggtctacgattttcttagcgctctttacagtctttactattcctcgttcaatcaacttacggataatgaaaggcatatacaattctgcagccatatccttaggcagaccacattcatgcattttcaaatccggtccgacaacaataacggaacgggcagaatagtcaacacgcttacccaacaagttctgacggaaacgtccttgtttacccttcaaactgtcagacaaagacttcaacggacggttattttcaattttaacggcatttgatttgcgagagttgtcaaacaaagagtcaacagcctcctgcaacatacgtttttcatttctcaaaataacatccggagccttgatttcaatcaagcgtttcaatcggttattacgaataataacacgacggtacaaatcattcaaatccgaagttgcaaaacgaccaccatccaatggcaccaaaggacgcaactcaggaggaatgacagccaacacctttacaatcatccattccggtttattcgtttccttactttcacggaaagcttcaacaacctgcaaacgcttcaaagcctcatttttacgttgttgagatgtttcagtattagctttatgacgcaattcataagacaagtcatccaaattcagacgttccaacaacatctgaatagcttcagcacccatcttagctataaatttattcggatcttcgtcatccaaatgctggttttctgctggcaaagcatctacaatatccaaatactcctcttctgtcagcaaatccatctctgcaatacccttttctgccattataccgggctgcaccacaatataacgctcgtaataaataacggcatccaattttttggaaggtaatcccaacagataaccaatcttgttgggaagagatttaaaataccaaatatgtgccacgggaaccaccaactgaatgtgtcccatgcgctcacggcgtactttcttttcagtaacttccacaccgcatcggtcacaaacaattcctttataacggattctcttatatttaccacaatgacactcatagtctttcaccggaccgaaaatacgttcgcaaaacaaaccatcacgctccggcttataggtgcggtaattgattgtctcgggtttcagtacctgaccactggaatgttccagaatttcttcaggtgatgccaaaccaatcgcaatttttgtaaagctcttgggcttattggtattattatcttttctaaaagccatagtctttgttaattttccattatatcaggttgacactcaatcccagaccacgcaactcatgcaacaaaacgttgaatgactccggtaatcccggtgttggcataggctcacctttcacgatatgctcgtaagttttagtacgtcccatcacatcatccgacttaacagtcaagatttcctgaagaatatgtgcagcaccgaatgcttccaatgcccaaacctccatctctccgaaacgctgaccaccaaactgagctttaccacccaacggctgctgcgtaatcaatgagtacggtccgattgaacgagcatgcatcttatcatcaaccatgtgtcccaacttcaagaagtaagtcacaccaacagttgcaggctggtcgaaacgttcaccggtaccaccatcatacaaatatgttgtaccataacgcggcacacctgctttgtctgtatactcattgatatcatccaaacttgcaccgtcgaaaatcggagtagcaaacttcattcccaactctttaccggcccaacctaacacagcttcaaaaatctgtcccaagttcatacgagagggcacacccaacggattcaaacaaatgtcaacaggtgtaccatcggccaagaatggcatatcttcaactctcacgacacgtgatacaatacccttgttaccgtgacgtcctgccatcttatcaccaatttgcaatttacgtttcttagcaacataaactttagccattttgataataccagatggtaactcatcaccgacagtagcattatattttttacgcttcatttgaccttcaatctctttgtatttaattacaaagttatgaagcaagtcacgaatcatatcatttttctgtttatctgtagtccacttgttaggattaatctccagataattcagactttgtaaagtcttcaaagtaaacttgactcccttcggaattatatcctcattcagataattcttcactccttgcgaagtcttaccgtttgtcaattcaaacaacttatcaatcaacaaatcagtcaagtcacctactttacgttcaaattgctcatcgatctcagccaaaatagccttaccggcagcttttgtcttacgatcaccaagcatacgctggaataattttttatcaataatcacgccactcaaagaaggagaagccttcaaagaagcatccttaacatcaccagccttatcaccaaagattgcacgcaacaatttttcttccggacttgggtcagattcacctttaggagtaatcttaccaatcataatatcaccaggtttgatgcgggcaccgatacggataataccgttttcatccaaatccttggtagcatcttcacttacgttaggaatatcagcagtcaattcctccaaaccacgtttggtttcacgaacttccaatgaatattcatcaacgtgaacagaagtgaagacgtcatttcttactatattttcagaaattacaatagcgtcctcatagttgtaacccttccaaggcatgtatgccacctttaagttacgacctaaagccaactcaccaccttctgaagagtaaccctcagtcaatatctgaccttcctctactctttcacctttacgcacaataggacgtaaagtcattgtagtactttggtttgtacgtttatacttcggtaaaatatattcctttgtatcaccgtcaaaacttacgaaacgctcttcttctgtctggtcatatttaataacaatacgacgaccatcaacaaaatcaacaacacctgcgccctctgctacaatctgagtacgagaatctttaatcaagtttgcttccaaacctgtaccgacaatcggagcctgaggttttataataggaacagcctggcgcatcatgttagaccccatcaaggcacggttagcgtcatcatgttccaagaaaggaatcaacgaagctgcaatagaggcaatctgattcggagctacgtccatcaagtcaagattctctacctcctcaacagggaagtcaccatccatacgagccttagcacgcttattgacaaaatgaccttcatcatcaatttgggcgttagcctgagcaataaccagaccttcttcttcttctgcagacaaatatttaacaccttccggcgacaaatctaccactccattattcaccttacggtaaggagtttcgataaatccaagatcgttgatttttgcatacacacaaagagatgaaatcaaaccgatattcggaccttcaggagtttcaatagggcacaaacgtccgtagtgagtataatgcacgtcacgcacctcgaaaccggcacgatctctagacaaaccgccgggtcctaacgcagacatacgacgtttgtgagtaatttcagccaatgggttcgtctgatccataaactgagacaaagcattcgtaccgaagaaagaattaatcaccgaagacaaaatcttggaattaatcaaatcaaccggagtaaacacctcattgtcacgcacattcatacgttcacgaatcgtacgggccatacgggccaaaccgacaccgaactgattatataattgttcaccgacagttcttacacggcggttacttaaatggtcgatatcatcaacatctgtacgggcattcaacagcttaatcagatatttgataatctcaatcatgtcttctttcgtcaaaacgcggatagaagggtctgtagtcaaacctaacttcttattcagtttataacgaccaacatcgcctaaatcatagcgcttatccgagaagaacaacttatcaataacatcacgggcagtagcttcgtcaggtggctctgaactacgcaattgcctgtagatgtgcatcactgcttctttttccgagttacacgggtctttttgcagtgtattataaataatggcataatctgccagattttgcttttccttatgtaataaaatcgtcttagttcccgattcgacaatggcatcgatatgctcattttcgagcactgtttcacgatcaacaataatttcgttacgctcaatagaaaccacctcaccggtatcttcgtccacgaaatcctctatccatgtcttcaaaacacgcgcagccaatctgcggccaacgacttttttcaaccccgatttagagacattaatctcgtcagccaaatcgaaaatctgtaaaatatccttatctgtttcaaaaccgatagcacgcaaaagcgtagtaacaggcaatttctttttgcggtcaatgtaagcatacatgacattgttaatgtctgtagcaaattcaatccaagaacccttgaacggtataattctggcagaataaagttttgtaccgttcgcatgaacgctttgaccaaagaaaacacctggcgatctgtgcaactgagaaacaatcacacgctcggctccattaatcacgaatgtgcctttcggtgtcatgtaagggacattccccagatacacgtcttcaatcacagtatcaaaatcctcatgttcaggatcggtacaatacaacttaagtttagccttcaaaggcgcaccataagtcaatccctgctccaaacattcattgatagtataacgaggaggatcgataaaatagtccaaaaattccaaaacaaagttgtttcgggtgtcggtgattgggaagttttccttgaaaacggtatacaagccttcgttcttcctgttttcaggagtcgtgcccaattgaaaaaagtccttgaaagactttaattgcacttcaagaaaatcagggtattgcaactgattcttcgtggaggcaaagcttattcttttatttgaagtatttgaagacatctataatttttttggaacctaaacaataataacaacaaaatggtttagagtcaaaaagatgactctaaacctctaacccaatagggcttataacttatttaagttcaacttcagctcctgcttcttccagttgagctttcaattgtgcagcttcttctttagaaactttttctttcaaaggagccggtgctttgtcaactaattctttagcctctttcagacccagaccagtcaactctttcaccaatttaacaacagccaacttagaagcgccacctgatttcaggataacatcaaactcagtctgttctgcagcaccagcaccttcgccgccagctgccggagcagctacaacagcagcagctgctgcaggttcaataccatattgttcttttaagatgtcagctaactcttttacgtcctttacagtcaggttaactaattcttctgcaagtttgttcaaatctgccattttgataagtatttaaaatgtttttattcaaataataataatgatataaattatgctctatcttccaaagttttaagcactcctccgatagtattcttccctgactccagggcagagataagcttctgcatcggtgactgcagcaacagtacgatatctcccagcaattcttctttagatttaatgctaacgagagtctccaactggctttcacctacataggcacattcttccacgaaagcagcctttaaaacaggtttgtcatgactcttacggaactctttgatcagtttcgcaggagcgttacctgtctcagaaagcatgattgcactagaaccggctaaagagcaataaacttcagaatagtctgcttctaagccatccaaagctactttcaacaaggtgtttttcacctgtaccagcttaatgccggctttgaaacaagctttgcgcagttcttgtgttgcagccgcatccaaaccagaaatatcactgatataaagatgcttgtatgctttaatctgctcggttaaattgtctatgattacttgtttttcttcccttttcattctacaaaggtcctttaaaggttaataattaatcaagtaatgacttaaggtctaatttaataccgggactcattgtacttgacaggaatacactcttcacataagtacctttagctgatgaaggtttcagtttctggatagtagccatgaactcacgagcgttatccataatcttctcagcgtcaaaatttactttaccgatagaagtgtgtacgataccaaatttgtcaactttaaagtcaatttttccctgcttaacctcctgaacagctttaccaatttccatggtaacagtaccgctcttcgggtttggcatcaatccacgcggacctaggattcgtcctaaagcaccaattttacccatgatggcaggcatagtgatgataatgtcaatatcagtccatcctgatttcaacttctcaatatactcgtccaatccaacatagtcggctccggcagccttagcctcttccaccttatcaggagtacaaagaactaacactctaatttctttaccggttccatggggcaatgttacaacgccgcgcaccatctgattagctttacgcgggtcaacacccagacgaacgtctatgtcaactgacgcatcaaacttggtaaaagtgatttctttcaccagctgagcagcttcttcaatggtataagctctaccattttcaatcttctctaaagctaacttcttattttttgtcagtttactcattacgtttgaagtattacaaattcattaaaaaggtttttcaccatcaacagtgatacccatacttctggcagttccagctaccatactcatcgccttctcaatttcgaaagcattcaagtcgctcattttaccttctgcgatttctcttactttgtcccaagacaaagaagctacttttttgcggttgggttgagcagagcctgatttaatctttgctgcttccaaaagctgaatggcaacaggcggttgtttggttataaaatcaaacgatttatcaccgtaaacctgaataattaccgggataatcttacctgcctgatcctgagttcttgcattgaattgcttacagaagtccataatattgactcccttcgaacctaatgcaggacccactggaggcgaaggattagcggcaccagctttaatctgtagcttgataagagcttcaacttcttttgccatgattctttttaaatcaaaaattaattatctttttcaacctgcatgaaacttaattcgagtggtgtctgacgaccaaaaaccttgacaattactttcactcgtttcttgtcgttattaacctcctctatcacgccggaaaaaccgttgaatggtccgtctgtaacttttacggactctccaacaacataaggtatgtttatctcctctggttgttccgcctgttcatcaactgttccgagaatacggttcacctcagatattctcatcggcaccgggtcgccccccttggtttcccccaggaagcctattacgttcgtgatatcacgaagcatatgaggaatctctccaacaagagcagcctcaatcataacataacccggaaagaagttacgttctttggtaattttctttccattacgcacctgatatactttctcggtaggtattaaaacctgcgaaacataatcctgcagccccaggctggctacctcactttcgatgtactcctttactttcttctctttaccaccgatcactcgaagcacataccatcttttcttaatttcagccatgtagttctgcgaatttattacaacatactatatataaaactcataatgtgtctgaacgaaaaatccatgacaaaaatgcccaacgcaataatgacggaagcaatcattacgattgtagcactactctggagttcagaccatgatggccaggagactttattaactaattcgttataaacgtctgcgaaataagcttttactttcattctcttgcagattgtttctttaaattgcgcacaaaggtacaatttaaaattcaatattcaaaattttttgcacgggaggagagactcgaactcccgacacctggttttggagaccagtgctctaccaactgagctacacccgtaaatcaaagaaatggcagtgaaccattaagattcactaaccatctcagatatcatattactcaagaatttcagtaatctgaccagcacctactgtacgtccaccttcgcggattgcgaaacgaagacccaaagaacatgctaccggagtcaacaactcaacagtaatagttacgttatcacccggcattaccatttcagttccttccggaagagtaatttcaccagttacgtccattgtacgcaagtagaactgaggtctgtacttgttatggaacggagtatgacgaccaccttcttcttttttcaggatataaacctcagctttgaatttcttgtgcggtttaactgaacccggttttgccaataccataccacgtttgatttcgtttttgtcgataccacgcaacaacaaaccaacattatcaccagcttcaccttcatccaacaatttacggaacatttcaacaccggtacatacagtcttcttaccatcagcacccaaaccgataatttccatttcgtcacccacatggataacacctgtttcgatacgaccggtagctacagtaccacgaccagtgattgagaatacgtcctcaacaggcatcaagaacggtttttcattatcacgcggaggaagtggaatccagttatcaacagcatccatcaactccattactttgtcttcccatttcggttcaccgttcaatgcacccaatgcagaacccaagataatcggagtattgtcaccatcatactgatagaaagaaagcaattcacgtacttccatttcaaccaattccaacatttcaggatcgtccaccatatccactttgttcaagaatactacaattctcggaacgtttacctggcgagccaacaggatgtgctcacgagtctgaggcatcggaccatcagttgcagcacaaaccaaaatcgcaccgtccatctgagcagcaccagtaaccatgttctttacatagtcggcgtgacccggacagtcaacgtgagcatagtgacgatttgcagtctgatactctacgtgagaagtgttaatagtgatacctctttctttttcttccggagcgttatcgatagagtcgaaagaacgcaattcagaaagacctttctttgccaatactgttgtaatagcagcagtcaaagtagttttaccgtggtcaacgtgaccgatagtaccaatatttacgtgcggttttgacctgtcaaacttttctttagccatgacttaaaaactttttattattaaacaatttatctcaaataactctgattttcatttacttacaaacataggacatctattagacactcctagtccgttcttttgagcgtgcaaatataattaaaaaaacgtgtgccacaaaattttatagacacatattatattaatttgccctctctttttctttggctttcaccaactgacgtttcaggacatcatacaattcatcaactgcctcctcaaatttcttagcgtttttctttgcaaaaacatcctgacctttaataccgattgtcacttctaccactttgttttccagattatcatctttctccagcttcaaagtcacttccgtattaatgataccgtcatgatacttctccagtttactaattttcttctggatgaaatcttccaattgtgcgcttgcggaaaaaccgacagcattaattttgatttccataatctcctccttttctttttggcctatcaaaggcctcgttataaacttgtttcaacttttcaaaagaattatgagtatatatctgtgtggctgccaaactttcatgtcccaacaacttccgaatggcttcactttcagctccattatttaacaaagctgtcgcaaatgaatgtctcagcacatgagtacttctttttgataacgccctgactttattcaactgcttttttacacgagcagcaacataagccgcattcgccggaagtccggcatctgtaataaagaatgtggaatcacacttttctttatcaagattcaattcacgttcaaccaaataggaccgaatatcaaataccaattcatccaacatcggaatcatgcgttctttatctccctttccgacgactttaatcacctttgcttccatatcgatatcttcgattttcagcgcagccaactcagagcggcgcatacccgtacaataagcaattttcaaaatcatccaatcccgaaaagaagcgaaatcattctttttaaagccctcatccaacaattcatccatttcatcatccgggacaaacaccggcaatttcttccgtatctttggagcattcaccaactccaccggatccatctcaaccactccttcccgcatcagataacgaaacatcgaacgcaaagaactcaacttccgattcaccgattttgcactttgaggcttcacttttctccttttctccccttcaccaaactccaacgttccagccatcaaccctgcaccaaatcgccgaaccaccccagaagtcacttccgaccatttctgtatcagctcaaccttttcacagaactcaataaattgattcaaatcttccgaataagcaatcagtgtattaagagaataacgcttaatatctttcaaatactccaagaaggaatcaacctcatcacccataaacttaaatcgaatccaaaataagtgattcttttgagaaaaacaaatttaaaaggataaaaattactcctctgcctgctgcaagctctgcttgtaaacagccttgatacgctgagcgcggttgcgtacagacggtttggtaaatgcctgacgatctctcaattcttttacaacaccggttttttcaaattttcttttgaatttctttaaggctctctcaatattttcgccttcttttaaaggtacaataatcatgatttctaagtttaaaaagtttatttattacgcattaatttttgtcggatacatctgctccgtttatcgggcatttaattgtccgacctcatcatctatgtatattctttcaatcttttctaatactgccagctcacgccgccctatttaacagcctcctttcaaaagagatttgatttttaatgcgttaaacctattgaattttgggggacaaagatatatcaaaaatatgaaagcaaaaatagtacctacatttttttccacaacataattcagcaaaaactaccaaatacacaatttaccactaacaaactcaacccaaagaccttttctttttacggatttaacaaatccttacaataataccccaagataccgttaatcatggttttgtaattcattgccttatggttctccggattcaaacgaagcacagcattgaatttattcaatgcatccgtcattcgcccttccgcataaatcaattcgcccaaatacaataaatattcttcgttattttcgttttcttttatacccccttcgagaaacaggattgcctcctggcgtttccccgcttccaccattttttttgcttcttctatcatttccatctttttatattcatttctggatattgtactgcacaaaaatacgcttttttatccagtacaatacaaagtataaataaaatgccatgtaccacaatgataattttccctcattgcactttcttaacgccctcctttctccctcttccctccctgtcaaatatatgacatctatatatcaaatataacacaaatataagacaaagataacagtctgttatctttgactagtatttgactactgtttgacatatatttaagcaaaagaaaaaaatgtgcaacaaacaagtaataagtacgaaagaattaaggcaatgtgacctttacagacaattccttacggtttcgggcataatcctctacgacaatccggacttcgttggattttccttttacaaacataggctccgtactcagacattgcagaattgccgtacgcggatcataagaaaaaaggcaccactcgccattaacttctccccgataagaagcgataccggaaaaattatcttttattctaaaacgcaaggtcccgccagtccccttacctaaatatgtaattgagggggctatggtatcatccaccaccgtataacggttgagagatccgatttctgccttcaaacttccggcagtacgagtggttggcaacggatattttctaccggaagaggtaagctcgcaaacaaacgacttttcagtaaactctcctttcacctcaagagttgcctttttatataaaggtgtgtctttacgggaaagaatcagaatttcgcgccctgacacggtatctgtccgaacttccgctacccgctcaacagaggagaacagtgcatcagcatccagttccaaatgccagctaccttgttccaacacatacggcacaccataccttagtatattatcagccggcaaggattccgattcaacggccttcccttttaattcaaaaacaagccgactggcattgccgtttatatccgaaaaacacatcttcactttcaccacgctatccggctcaacattcaccgttccatccccctgcatccgcacagccagtaattcgtgctgccgattaccaaaacagcgataaaaaatctctcgcttcttataacggtcaaaatccttcacatcattaatcagacgcgattgaaaaaacgagcaggaatccattgacaaatgataaagcgtatcacgcccagcaaccacatccaatgtatatacccccaatttattccatgaatcttccatataatcaagaacatgtgcccccagtcctattttaccggccggcacgatacaacgtccggcagaatatttaccaccccctacatttttcacaggacacgtacggagcaactccacccgtccatcctctttgacagaatacaatcccaacaacttcacctgaggagccttcaggtcgcgcacagaataaaaaagaagaggattccacgtatgctctgtacgagtgttacgaatttcaaaatgaagatgcggacctgccgacgaaccggagttgccactataagcaattgtatccccctgccgataacagagttgacgggataaaacattctcatcaatgcgaaaactctccttctcatactgaatttcccttaccaaagcagccagacaaggctcgaaacgctgcaaatgcccatagacggatgtcgtcccgtccggatggtcaatgtatagagccaatccataaccaaccggagaaacagcaattctggaaacaactccatcctgtatacaaatgacaggcatcccctccactccaccggtcttaatatcaacaccggaatgcaaatgagtggcacgcaactcaccaaaattaccacttaacaaagttctaccagcgatcggcttaaccaaattctgcgctttcaaatcattcaacacaaacaaaatcaaacaattgtaaaaaaaagcgacaagtaagacacgattaataattattctcatacaaataaatctacaaaaatattacgcaaatataccaagactcttgataatttaaagaataaatcatatctttgtcatgtaaagattaagttatggcagcaaaacacgatgtcgttgttaacgagcttgactataagatcgagaaattaataaaactatatatatcctctttggagcgaaataaagatttggaaagcaaaatcgaaacattgcaatctgaattggaaatggctacaaaggagaagcaagatttgaacgaaaaactaaaaacagccagagtggctaatgcgatttctagcggagacggaagttacgaagcaaagatgaggattaaccagctggtgcgggagattgacaaatgtattgctcttttgaataattgaatatgtcagaaaaacgtaacattaacctaaccatagccgacattcctctcagtttgacgattgcaccgtccgacgaagagattgtcagaaaagcggcaaaggagattaatgaccgcgttttaaaatataaatccggtcatccggaaccggagcagttctatttcttggcttttgtatcactgcagcataccataaccatgctacagcaagaagaaaagtttagagaaatagagcagataaattcaaaacttgatgaatacatcaaagagtaaataacggaaaatagttctttgtaaatagatattcccgcattatttcgactttaagcgaaaaactcaacacttaaattattagagcggacgcttaatttgctgaagacaggcctcaacccttcggggttccttcgggacggtggaagtctgaatcaaatggcagctctacccgtgtcattcaggggttttattaaaaagaaatagtgcgggatttttttatgcaattatataaacactattataaattaattaaatatgtatacaacgatcataatcgcattagtcgctttagtggcaggcgcagccatcggatggacagcattgcaaatcgcaatgaaacatcgggctcaaaatatcataaaggaagccgaagctgaagccgaagtcataaagaaagacaaaatattacaggccaaagaaaaattcctgcagatcaaggctgagcatgacaaacaagtgacagccagaaacaataaactgcaagccgttgaaaataaactgaaacaacaggaaactgatatctcacgaaaattagaagatatccaacggaaaaacaaagagattcagaaccaacagaacaatatcgacgttcaaaaagaactgattgaaaagaaaacagcagaattagacaaactgaaaaagcagcaaattgaacaactcgaagcgatttcaggcatgtcaggagaacaggcaaaggaaaagcttatcaactctctgaaagaagaagctgaagcagaagctatttcatatgtaaacgaaatcatggaggaggctaaaatgaccgccaacatggaagcgaaaaagcttgtaatcaaaacaattcaacgcgtcgcaacagaaactgccacagaaaatgctgtttcaattttccatattgattcagatgaaatcaaaggacgcatcatcggtcgtgaaggacgtaatatccgagctttggaagcagcaaccggcgttgaaatcatcgttgacgacaccccggaagctattgtactttcaggatttgacccggtgagaagagagattgcacgcctgtctttgcaccagttagtgacagacggacgtatccacccggcccgcattgaagaggttgtgaacaaggttaagaagcagattgaagaagagatcattgaaaccggtaaacgtacgaccattgacttgggtattcatggattgcatccggaactgattcgcttaattggtaaaatgaaataccgctcatcatatggccagaacctgttgcaacatgcccgtgaaacagccaatctttgtgccattatggccgcagaactaggcttgaatgtaaagaaggccaaacgtgcaggtttgttacacgatataggtaaagtgcccgatgatgaaccagaattaccgcacgcaattttaggtatgcaactggcagaaaaatacaaagagaaaccggatatttgcaatgctatcggctcgcatcacgaagagatagagatgaccacactcatcgctcctatcgtacaggcatgtgatgccatttcaggtgctcgtcctggtgctcgtcgtgaagtggtagagtcatacatcaagagattgaaagatatggaagacttggcattatcatacaatggtgtagtcaaaacatatgccatccaagccggaagagaactgcgagttgtcgttggaagtgaaaaaatttctgatgcagaagcagaaaaaatctcattcgacattgcaaaacgtatccaggacgagatgacttatcccggtcaggttaaggttaccgttattagagaaactcgtgccatcaattatgcaaagtaagagggaaagataaattcttatgaaaatgcccctaaaagggggcattttttgtataaagtgtcccaaatatgacaacaagtcagaaagaccagatagaaaagcaatttgaaaaggtattcaaacaatattacccactacttgtagccttcattgaacgccatgtaggagatgtaaccttggctcaagatctggctcaagatgtgttctttaaactatacgaaagcaaatctgacttcacaacagatgccagtttaaaatcatggctctataccacatcccgaaatatagcaattgattacttacgtcatctgaaagtagaagacaattaccaaatactggcagcagaagccttaatgtatgcaggagaggctgacgaagaaatcaatgaaaccttagtcaggaaaatcaatgaagccctgaatactcttccggaacaatgccggcaaattgtaaaaatgaatatcatcgacggatataaatacactgaaattgcagatatgctgggcatttcgattaataccgtcagaactcagatttcaagaggatataaaaaactccgcgaattattatctgaagatttcaaaagccttgtcatgctctatctacagattcacaaaaccacctaataagatcatcatttagtatagctagaaaaattttttagttaaaaacgagatttttgtcacacaaaaaagcgatataaacgtttttgtcatataaaacagacataaatacggaacgcaaacaaacgatgcaagactttaaaattgacataaaactcatttacaaaaagatagaaggcaggatcaacacggaagagaaccgtcttttcgaagaatggtatcaggaccgcaagcatcaacaatacttcaataaaatccgaacatattatgaactgcaacacgaaccgtccattgaaaaagaagagacggaaaccgcttggaaaaaactaaaggagcgcatccagacagacatccgcagcaggaaacaccgtatatggaagacctgttccgccgctgcatcgattatcctgctgcttgccttataccagattttgatgaatctgtcaacaaacgaacacaaaaccgatggcaaagccgaaataatccccggcagacacaacgccatactggaactggctgacggaagcagtctgaacctaaaccgattaacccaagaaaacaggacacgaatagaacaaaatgtccacatcgacagcaaccgattaagttacaggcacagaagcaaagacaataggcggaaattggaattcaacaaaatcagcgtaccgcgcggaggcgaattccaactgattctatcagacagtacgaaagtatggctgaattcagattcccggctacgcttccctatagcattcggatcggacaaacgagaaatatatctggaaggagaagcctattttgaagtatccaaagacagtctgcgtcctttcatcatctacacagaaacacaaaaagtcacggtattgggaacatccttcggcataacaagctatccccgggaaaactacgagacgaccactttgacagaaggaagcctgaaagttgaattcccgcaacatgacaacaaggaatacatgctgacaccgggtcttcaaataagatacgacagaaacgcaaaagagatcaccagaaaacaagtatcgacagatgaatttaccgcatggaaggacgggaaatacgttttcaagaaaaagcggctggaagacatgctgaacacactaggcagatggtatgacttccaggtgttctatcaaaatgacgaatgcaaagaaatcctgttttcaggagaaatacagcgttttgcgaatttcaattccatactgaacctgctcagaaaaagcagtgatgcggattttacagtcaatgggaataccgtccaagtacgaaaaaagttttaacctaaataaataccaaacatgaaaaaaacaccaattcagacagccagctcccaccgacggagtgaatgtgggaaaatgctattgggtgcgtcccaattgcttatcctgctattggtattcaacatcaatttgagtgcggaagccttttcgcagcatcagaagataagcgtatcgctaaagaatgccggaatagcagaattcatcgaagctatcaaaagccaatgcaaggtaggcttcgtatatgactacaacaaagcccgagccattccctccatcacaattgatgtcagaaacaagcccattcatgaagtgctggaacaagcattaaaaggaagcggctttacagccattatcgaggataacaccatcatcctccagcagacggtaacacaagcacaaacgccgcaggctacagtcatcaaaggcaaggtcgtatcaaacgaagggaaaccgcttcccggtgtgaccgtgctaatcaaaaacaccatcgtaggaacagctaccgatgcagacggagccttcgagctgacagtagcggatgccaaaggcaagatcctcgtattctcgtttatcggaatgcaagagaaagaggtagaaatcaaagaccccaaacaaccgctgaaagtaacattgacagaggccgccgagaatttgaacgaagtggtcgtaaccggtattttcagccgcaagaaggagagttttacaggagcagcaaccacctacaccagcaacgagctaaaacaggtaggcaaccaaaacatcatccagagcctccgcacattagacccctccttattagtaatggacagcaaagaatgggggtcggatccgaaccgattaccggatttggaaatccgaggcaaaacatccattgcaggatttaaggaagaatatggaacagacccaaaccaacccttgttcattttggacggttttgaaacgaccctcgaaacaatcatgaacctaagcctcgaccgagtagctagtgtaaccatcttaaaagatgccgcatctacagcaatctatggttcgaaggctgcaaacggtgtcatggtcgtagaaaccatccagccggaaatcgggaaattaagagtcagctaccgaggagactttaccgtatcctttgccgacctgacagactacaacctgatggactccaaagaaaaactggaattcgaaagactttcaggatactacaccagcgaataccccagtaaccaactgttcctaaacgaactgtacaacaagaggtccgctgaaatcgcacgcggagtggatacctactggatgaatgaaccgctacgcacctccttttctcaccgacacaatctatatgtagacggaggggatgaagcgatgagatatggtctgggaatcaattacggcacgacaaaaggtgtgatgaaagactcagacaaagacattgtcgcagtaaacctggacttgaactaccgtatcaaaaacctgcgatttgccaacaaagcctcatttgaatatacagatgcagatcgtgaacctgtacctttttccaaatatgcacaggcaaacccctattaccgcaagaaagatgcagagggacaagtaaccgtaacccttgacactctgccagacagcaaagtaatcaacaatcctctatatgcagccacactgaaacacgtagacaataccaaaagcatcggtctgactgataattttcaaatcgaatgggatgtcaccacggctttacgtgccagagggcgtataggtcttacctataaagaccaggatagtgaagccttcaaatcgccgaaacatccggatttcatagaaaacacagaactggaaagaggaagttacacagaatcctacaaccgcaccttctcatatgacggagacctaactgtaacctacggtaaactgtttgccgacaagcaccaggtgaatatagtcggtggatggaaattccaacagaccactaaccgctccggtggatatagtacagtaggattcgtgaacgacttctatatcaacccctcgttctcaagcggctataaagaaggttccaaacccacctattcaaaaaccgtatccagaagtaccagcttttacttgacagccaactatgctttcgacaaccgctatttactggatgcaacttaccgtgccgacggttcatccgtattcggagccaacaacctgtttgccaacacatggtcggtaggacttgcctggaatatccacaacgaaaatttcatgaaagaaatcgaatggcttaccatgttaaaaatcagaggttctatcggtaatccgggaaaccagaatttcagcgcctaccaagctatgaaaacctacaaatacaactcctggctacaaaacaaattcggtaccagcgccctcatcgaccaattcggcaatcctgatttggaatggcagaaaaccatggaaaaatcaatcggtatagatgtggtgctactgcaaaaccgtcttcgctttaacatcgactactacagcaaagaaaccgatccgcttctggcaataatcaccgttccgtcatctgcaggcacaacatcactgaccacaaatatcggtgaacaaaccatcaaaggcaccgacggacaaatcagtttctctccaatctaccgtccgcaagacagaatcaactggacaatcagaggaacattccgccacgaaaaaggcgaatacaaaaatgtagggaactcattggaaaaactgaacaaagacaacatcaaagccaaaagcctgacccgctatcatgacggtggcagtccggacgacttatgggctgtaagatctctcggtattgaccctgccaccggtaacgaactatttctgaaaaaagacggcagcagcagtttcgaatggaatgtagaagacgaagtgatagtggggaactcccgtccgaaactagaaggcgttgtcggcacaaccctttactacaaaggcttgtccatttcagccaacttcagatatcaggtaggcggctccacttttgccagcgcactattcaataaagtcgaaaatatctcaaaagacaaccttttcaacaatcaagacaaacgtgccctctatgaccgctggcaatatcccggacacaaggcacagttcaagagcatcgcaaaaagcagcagcacagaaatgtcctcacgctttgtactgaaagaaaatgtattcaagggcgagtccattaccatcggctatgaaaccacagccaactggctgaaacacatcggagcatcatccatgaccgtaaatgcctacatgaacgacatattcagatgctcgtccatcaaggaagaacgaggaatcgaatatccgtttgcacgttcagtcgcattttccattagcctaagattctaatatacaaactataaaatagctgacaaatgaaaaaatacatactatatatcttatttattcccgctttattgctcggttcctgcaacaaatggctggaaatagacccggacgaccggattatggaaaacaacctattcagcgaccgggaaggattcatggtcgccttgaatggcgtatacattgaaatgagttctaccaccttatatggcggatggatgcaggtaggcttgtttgatgtactggcacaatactatacagaagctatgggatacaatacccattccttttcaaactacaaagatttccaatatgagcaggaaggtgtaaagaaaacctaccaggaaatttgggaaaaatactacaacttgattatcaactgcaacagtatcatcgagcattgcgacaagtcaaaagacatattgggcgagaaatactacagcctcatcaaaggcgaagccctcgcactgcgtgccttcttccactttgaggtactgcgcatctggggaccgattttcaaagagaatcctgaaagtctgagcattccttatgccgaaagctctaaaattgaagtacggccgttattgaccggaaataccgtatatgaaaaaatactcaaagacttgcaagatgccgagacactcatgaaagaacaagacccgatcattacagaaggagtactttttacacccggaggattcggagaaagtaatgacatgcgctaccggaatctacgtcttaactactttgcggtacaggcactaatagccagggcagcactttattgtaacgatcgggcgacagcattggattacgccaaaagagttgtcacagcagtgcaaaaagaaaaggatgcaatcttcccctttatcgtacgcggacaagatgaacaagaccgtgtgtataaaacagagttaatctttgcacaatacaatctgaaacgcagtgacctttggaaaaactacttttcaaacagcttgtctgatgccaacgtactacgagtaagcgatgccaccgttgatgacatgtacgaagagaccgattatcgctacaagacccaatggaaaaaggccaaaagcccgcaagaagtagaacaatattacttcacaaaatacaaagatgtcaccctttccgatcctgacagcgaaaaagaaaaacagcaaaaagaataccgctaccttgtacccatgattcgcatatcggaaatgtactatatcattgcagaatgtgaatcagaccagactttggcactggaagccatcaacaaagttagaaacgcccgcgcacttaaaaatctgacagactacagcctgttggccaatgaactagaaaaagagtacaagcgtgagttcatcggagaaggacaactgtttttctattacaaacgcctggcgcaaaaagaaatcgtctacggtcaaggctcgtggggaccgctcaccgtaacaatgaacacagagaaatacattccggaactgccggattcagaaaagaacaaccgaattgaataaacaacgaatcatgaaaacgataatcaaatatattacaattatttccgctctgttctgcctgaacagctgcgaacaagacttaatggattacgaaggagaagccggcatctattttgccgtacaatttccttggcaatcaggatatggagattcaacacaatgggaattaagtccgatttcggatgtctctttcttcttacagaaaaaagcagacagtaccatcaaggtacgtgttcaaattaccggcaacacgatcgataaagaccgccaattcaaaataaccgtggtcgacaccggcagcactgctgtggtcggacatgactacgaccccataccggaaacccacatcctccgagccaacacacactacacggacatacctataaaagtatataagcaagcagatctttccggaaccagcagaaaaatcatgctgcgattagaagagactgctgatttccgtctgcctatcggcacatggtatccctggccagaccaacacaaatggataccatccgtaggtggtgaagctgtagacatatctgccattgaacattttgtcgtaatcagcgatgtagtgaaagaaccggagggctggtatgccggagtgctaggcaaatttactgtaaaaaaattcaatctgatgtgtgaaatgtttgacttgacaatcgacgatttcagcaaagaagcaatgaatcaaagccgtgcaacagcctacgggcagcgctttgatgcctggctacagacacagaaaagagaaggcaaggaagttatggaagaagacgggacccccatggaaatgggaaaatatttatatggcggaggctactaatactataaaaaaatcatatcatgaaacttaaatatatcatttcagcactatttgcgataggaatatttgcctgctataatgacgaaggcaactacgactatcaggaaatcaacgaaatcagcgtaagagacagtctgaaggaagaatactccgtctacatgctggcagatacactcaaaatatcccccgtactgaactttacacaagattcaacgacagcaggacgctttgaattcagttggtatctcacttcgctagaatatgaagaaggcaaaataacaaaaatctcagaccaactgaatctggtctatccggtaacggccaaagaaggtagctacaaactgagtttaggtattaaagatctaaaaacaggtgtagaatggctgacccattccactctcaatgtaaccactctctttactaacggatggctcatgttgggagaaaaagaaggaaacgtagccttggacatggtaaccatcagcaccaaaggagatacaatcatcacccgcgatattttaaaaaattcaggcttacctgtattgaaaggtccccgtaaaatggtatccacagccagagaaggctacaatccatggtatgcaggatgttttcttatgacagacgaaggcacgtttgaactagaccgcaaaagcctctcatcagacatttcaaccaacataagaagtgtcatctacgatccgaccataaacgatgacttctcggctagcgatttatttcaaaacggcacttatcaccgatacttattgggagacaacaaaatatttgtaaaccaaagcttgatacaaagcaattcgtatggaaactgcatcaataaatacactcaatattcagaagaatatttcaacgtatatcctgaagctatctggcaattcaaccccatgtacgttcaagggaaacaactggtgtacgacatggacaacaaacgctttgcccaatttacctacatgtccagctactgcgacacgctcccagacaatatcggagatccgttcgaatggaaaaccggcaatgaaatgattgccatcaacaattcgttacgcatagtcgaaggagcccaagtcagctacgccgtcatgaaatcacctgaaaacaaatattatctatacagcatgcttcctgcattggcaaagaaactggaacgatatgacatcagtaccctacccggcatcgcccaagcgaaacaattcggtttcagttctaagtatccacgcatgatttatgcgacaggctcgaaattatatgcatgcgaatttcttcccagcggaatcacccataaagaattggaagatttcggaaatgaaatcaccatgattcattttgacaacgctaaagaatccaaaaaagatttcttctatgtagcgacctacaatgaaaccgatggcggaacaatacaaaaataccaattaacagataatcccaatgatatgaaaactgaaaagttcgaaagaagcagatgggaaaaattgtgtaaggtaacatccatgtgttggaaatggaattaaaatagcagagcaagcggtgacattaaaagtgtcaccgctactctataaaaacacaaaacacccataacaaaacgatattgatatcaattgctcgaaatcctgcaatccctaaaaatgaatttcactcacagactaagttcatcaacatatccaaatgaaaagctgtttattctattccaatagagaaagtgcaatgcaaaaagagtatcagctcgacaaccattcactcaatattgacctcaccgaaaagacacattgcctacaaccatccgcttttcatgcaataaactaaccgttacaactgcaaaaggcaaggttataacagtagtctggaaagaagaaaaaaacatctcgcacaattttatcagataaaagaacaataatctgaaaccttctaagatgaaatacgtatacaagagcattaaaaacattatatgtacaactaaaacaaactaagtatgaaacatttaggattaatgctcacggtttcacttgctctattcatgagctcctgctaccccgagggcgccgacactgttgaagactacgatgtagccatcactaactatgacaaaggagctgatttttcgtcattcagcacatttgccattcctgacaccatcgtctatttcgcaaatgataaaaatgcgaaactagatcaccaattcgacgaacaaatcatccaagtcgtaacagacaattttatcaaacgaggctacaccaaagtcgagaaccctgaaactgccagctttatcgtaaccgtttcagctttttctaatgtaaactattcgtattacatcgacaactggtacaataattggaactggtattggggctggtggccgggaggagctttcaatccttactatccgtggtatcctgtcagcgtatatgcttatcaaagcggctctgtggtcattgacatgatatctacaactgcacggtcagacaataaagtaaatgtcatctggagcggtattgccgacggtttgctccaaggcacacaacaatctattatcaatcgtgtaaatacacaattaaatcaatgctttattcaatcaccctatctgaaaaaataagacgataacatcgacgcattaaaattaaaatatcatgaagaaactatttatattggcgatatgcctaatcggcattagccccctattgaaagctcaggttttcaatgtcaattaccacatgacacttcctttcagcaaagtcaaagactatacagacaaagcaagctttagaggatttgacgtagaataccaccaattcatgagtgacaactgctcaatcggcgcagcaatcggttgggatgtattctatcaagacaagcaaaaggcatccggaaatttccgatttaacaatgacaataacatctacaccattaccggaaaccaataccgctacatcaatacagtccctatgctggccatcagccgttactatttcacagatcctaacagcaccttccgtccttatttaggagtaggtattggaacccaatggacagaaaagaaacttgaggtagggcaatatacctcaaccgtttctcgttggcaatttgcattagccccggaaataggcacctatatatcaatatgcagccaatttggattcaatgccggagttcgctataactatgcaacaaaagcagcacatggaagagttcctgagatttcctctttaacatttaatatcggtatattactcaccggaaatcaataaacacaatcctcatcatacaaaaaacagcctttagatttttatactaaaggctgttttttgtataaatactggtaaaaaaataaggactatctgattgatagtcctcgatcagcggagagtgggggattcgaacccccgatacagtaatcccgtacgacagtttagcaaactgttggtttcagccactcacccaactctccattggtagcactgaattgcgctgacaaaagtagagtatttttttgaacctacaaacttttagccgactttttctaatattatttcttatgagtgcattctcggcgtaatttatcgaataattggcgatgaaattttcgttctgcaccttctaatcgccatattttagaagcaggaacaactttcatcaatctcccataatactcctttttgatatcacgcattttctgttcatgagtcaaaataaaattaatagaggttgcgtaatctgcttcctttatcgctgttgcttcccgaactcttttatattctgccttcataatttcttcaatatcgcgatattttcgctgcatttcattatataaaggccaaaatacagctgcttcttccggggataaatctaattcctgcgtaaagaatgccactttttgagcttcaaattctttgcgtttttcgtctgataatttgcctgtctgggcaaaagcgactccagtccctaaaagaaaaaatattacaaacaaaagatttttcatataatcattctttaataaacatctgccaatatcaattcgtaattgtcaatctccgttgccaaatattcgataatctcatcacttgtcggattaaattcactatcaaaaatatcttcttccaataactcgtcctccaaagtactatgagcaaccgcttctcctgacgcagtttgatttctctccatcgtcatcgaaacaacaacatgcataatccccatcatcactacaaacatcgccgcaataccaatataaggacgcaacacctgcaaaagactcggtttacgcacatcctttttattatccgtaagctccatgattctttcggtcaatccgtcaaaataaccatcaggcactgcaaacggattcttttccttgtacttttcgttcatgttttccatcaccgattaatttaaggtatcaacaattttaagagctgcttccactttctgcactgcattatgatacgtagcctttaaagtacctaccgctactcccaatgcctgagacatctcttcataagacaaatcatcaaaataccgcatattaaaaacgattcgttgcttatcagacaataacaagatggcacactgtaattctttctgtattgcatctccagaaaaatacgtatcactttctaacgtattgaccaagaaatcagagatctcatctgaattaccatagaccttacgtcttttttcatttaaaaaattcaaagcttcgttggttgctatccgataaatccaagtataaagttttgaatcaaaacgaaactctttcaatccctgccatatctttacaaacacattttgcaaaatgtcatctgtatcttcatggctaattacaatttttcgtatgtgccaataaagacgctctttatacttgtcaaccaacaatctgaatgcatcctgctcacgattattttcgtgaaacaatttgaggatataatcatcttcaattacattcatagcacgctcttaattaatttctattcttagacaaatctattatagaaaagtttatttccatagatctgaaaatgtatgtatacctttaaaataataacgaaatatcaagctatgaggataaatacaagcatcatttcgagtgcccgttccatgtttataatgttttttcaataaatgaaactcttgataagcctgaataatagatttagcatttgcccactcccctttcaacgaaaacagcagcatcgctgcactatctaaaaaccacctttgccaacgcacccttctccactctcttgtattcagatttttatataacatcaataaattattccgataattcaagaataacttacgagggtgattcataggcaatgaacctccgcctaaatgatacacgactgatgctgtacaaactttcaatattcgcccactgtttcgcaaacgccaacacatatcaatttcttccatatgagcaaaaaaacgctcatccaatccgcctatccgcatatatgcatcccggcgaatacataaagcagctccactacaccaaaacacctctcgaatatcattatattgaccaaaatctgtttcaagtatatccaatattcttcctctgcaaaacgggaatcctaaataatcaataaaacctccacaggcacctgcatactcaaaagagtttttatctttataagccataattttaggttgtacagccacaacattgtgatcttcttccaagagagcaaccaagggatccaaccatcccgctgtaacctcaacatcactattcaacaacactacaaattcctcctccctcatcgctatagcccgattatagccacctgcaaacccataattattatcaaactgcacatattccacttctggaaacatcgcacgcatcacctcggcagaattatcagaagaagcattgtcaacaacaacaacttttcctattttcgaattagtattcctaataacagaaggcaaaaactcctgcaataatttttcaccattccaattcaatataataacagcagctttcaccatattctaatttatttccctcttatgtttccaacgacgatgagaccacaaccataattctggcttttcctgaatataacgttccaacatctttgtatgcatacgggtcaattcgcctggttccaaagttcctggctctccacataaatccatcacatctacctcataatagccccgtttcactttccgcatccgcaaggaaataacaggaagattgaatttacgtgcaattttttccgtacctatcaacaccggtgtatcctgatgaaggaattccatccagaaattcaaatttgccacattaggagtctgatctccgataaaagcagcaaagaaaagacgccccttccgacgattgtttacaatttcgcgcaacacatcatttttagggataggtattgcaccgaaacgcgaacgaatctgatgcatcattttatcaaacaccgaattatggagaggcttgtacaatgtgaaaaaatcaacattgtcagacatccataaactataagaagccatccattcccaatttccataatgacctaataccacaataaggcttcttccctcattcaaataattctgaacaacttcattattattaaaaacacatctacgctttatttcctctgccgacatatgccacatacgataagactctaccaaaaaatcacacaaatggtgataaaatcctttggctatcttacccaactctgcttccgttttctcaggaaaagaatttctaagattcatcatcacaaccttacgccgataacgaaccacataataaagcaaaacatagcatatatcggcaaacagatacaacacacgcaaaggtaacagactcaataaccaaacaaatccgtatacaattttcgacaacataatgattcctaaaattatttcagagtattctctactaaaaacgcaacaaaaatacaaagagttcatttaaaaacaggcaatagaaagacaataaaaattaatttgccactttcatattttattactattttcgtgagtccaataaagtattggaaccatcaaacagagtgatggttgaacaacccgaacgaattacgtttggtacacatacacttaactgctgacaaattatggagcaagaaaacaacatcacagacattcatgccgcagatgagcaactcataaacgatgagaaaaccactgtcgaagctacaaaagaagttacagaaatccctaccattgatttctcctctctttcaaccgaagatattgtaaaacatctgcaaaagctaatggaacaatatccagtgaatctattgaaagatatcatggattctctgccagaaattttcgaaaccaaatacaatgcagaatacgctacagcacttgctgcattcaccgcagatggagacaatcctgaagattttgattataaaaacgacagcaaagaacgcttcaaccaattatataaaacatataaagacaaacgtagcgcacaaaaccgccaagtagaagctgaacgagaagagaatttaaaaatcaaacaagggattatcgaagagttgaaagtattggttcaaaaagaggaatcaatggacaaaacgtttcaagaatttcgtgaattacaagagagatggagaaacacaggccctgtaccacaagctcaacttaatggattgctagaaacctaccatcatcacgttgaaaatttctacaactatataaaaataaataaagaacttcgagatcttgatctcaaacataatctcgaagaaaaaactgcattatgtgaagaagcagaaaaattagatgaaggcaatgatattacaggagctttcaaacagcttcaacttttgcatgcacgttggaaagaaatcggtcctatccccaaggagcaaaaagaagcattatgggaaagatttaaagctgccagcacacaaatcaacgataaatatcacaattttttcgaaacgttaaaagcagaacaagataacaatttgcgcatcaaagaagaattgtgcaataaagcagaagcaattacagccgaagaatacaagactatggctcaatggcaaactgctacccagaaaatccttgacttgcagcaagagtggaaacaagctggcaatgtaccacaaaaagaacgcaatcggatatataagaagttcagaagcatctgtgatattttctttgaaaagaaacggacttttcatgcagaattggatattgaattagaaaagaatttacaattaaagattgccctttgcgaaaaagtagaagccctcaaagacagtacagattggaagacaacaacagataaaataatagcttgtcagaaagaatggaagaaaatcggtcctgctccgcgcaaatactccaacaaagtatgggcaagattccgcgctgcatgcgatgtatttttcaataataagagtctgcacttcaaagacaaagatgcagaacaagaacagaacttggagcaaaagaaagttctaatagaagaagtgaagcaattttctcttagcgggaataccgatgaggatattgaaaagctgaaagattttcaaaaccgttggagcaaaatcggttttgttcccatcaaggaaaaagactctatccaagaagaattcagaggcatcatcaatcattggtttgaccagttgaatctcgatgaattcgatcggaatctggaacgcttccgtgctaaaatcagcacattggacaccgatgaaaacaaagaatacaaaatcatcaatgaacgagaaaaacttgtagcaaaaatacgccagctagaaactgacatccacacttgggagaacaacattggcttcattgcgaagtctaataaatcacaaggacttttaaatgagctggaatcaaaaatcggcaaaacacgccaacgcttaaatctgctgcaagaaaaactaaaagcattggatgaaatgatttaaaaacgcttagttgcaaataagagacattcattggtcacataaagttaaaaggttgaaagtaaaaagtgtaattctttacttttaacctttttctttttcctgtaatttcttacctttgccactttgataaatcactaaatcaatatacagtgtcaacaaaatatgtattcgtcaccggaggcgttgcttcttctttaggaaaggggattatcgcatcatcgcttgctaaattgttacaggcaagaggttataaagtagccaatcaaaaactggatccttatataaatatcgacccgggtacattgaatccttatgaacacggagagtgttatgttacagatgatggagcagaaaccgaccttgatttaggccactacgaacgttttacaggctgtccaacttcacaagcgaacaacattacaacaggacgtatttaccaaaatgttatcacaaaagaaagacgcggagactacctcggaaaaaccgtacagatagtacctcacatcaccgatgaaatcaaacgcaatatcaaactgttaggcaataaaggagaatacgatgttgtcattacagaaatcggaggaactgtcggtgatatcgaatcattaccattcattgaagccgtgcgccaattgagatgggaattaggagagaaatctgtactgatccatctaaccctagtgccttatttacatgcttccggagaattaaaaacgaaaccgacccagcattctgtaaaagctctgctggaaattggtgtacaaccggatatcatcgtactccgcacagagcatgatttaaatactgaaatacgtagaaaagtagcattattctgcaacgtagctcctaaagccgtaatgcagtctattgatgtagacaccatttatgaggtgcctatcaaaatgcgggaagaaaagctggatgaaatcgtattggaacaacttggtcttccgctaaacagcgaacccgacttggacaattggaaaaaattcctctataaactcaaaaattacagtaaagaagtcagaattggtcttgttggaaaatatgtcgaactgcacgatgcatacaaatcaattgtagaatcctttattcatgcaggagctgttaacgactgtaaagtgaatattgaatggattcatagcgaagaattaaacaaagaaaatgcaccggcaaaactgaaggacctgcacggaatacttgtcgctccgggtttcggacatcgtggtatcagtggtaaattagtagccatcgaatatgcccgtacccacaatatcccatttttaggtatttgtctgggtatgcaaatggctgttattgaatttgcccgcaatgtattgaaaatggaaggagccgactctacagagatggctgccaaaacagcatatccggtcattgacctaatggcttctcaacacgacgtcacagacaaaggaggcacaatgcgtctcggtgcatataaatgcgaattaaaagaaggatctaaagcattcgaagcatacggacaaaaagaaattcaagaaagacaccgccatcggtatgaattcaatagtaaatatcgcgaagaatttgaaaatgcaggaatgattacaacaggagttaatccagaaagcggtttaactgaaatcgttgaaatcccgtctcacaaatggtttgttggagtacaattccatcctgaatataaaagtacggtaattaaacctcacccgctatttgttgcattcatcaaagcgtgtttatcataatcagcatactaattattaaaatatggacaaaaatacagttatcggtcttgtaatcattttcttaatcctaatcggattttcgtaccttaaccgtcccagcgaagagcaggtgcgggaaatgcaaagacaagactctattgcccgagtagaaaaacagaaaatggaaattgctgctgtacaacggcagctggaaatggaagctgcagcaaacggtaatgctgcaggcataaaaagagacagtgtattcatgcaagatagtcttgcagaacagctttatacattagaaaataataaaataaagctgaatatcagcacacgcggaggacgaataacaattgtcgacctaaaagaatatcgtacacacgactctcttcccttagtgttatggaaggaaaaagaaagtgttttaggcatgaacttctatgcacagaacaaagagatcaacacagaaaactttttatttgtaccaagcgctacaacgacaacgctgtatgcaaaagaacaagcacaaacactgactatgcgcttgtatgctgacagcacaaagtatattgaataccaatattcattggcgccggatagctacatggtagatttcaatatcattactcataacatgggtgacgtgattgcttccaactcatcattcttaacactgaattggggcgtaaacatgccacagttggaaaagagtaaagattttgaaaatcggtacactggtatatattacaaattctttgaagatgatgtagagcatatgtcactgacctctgacgaggaagagacattgactaccaaagttcaatggattgactttaaacaacagttcttctcctcaatcctcattgccaaaacaccattcagcgatgtaacattgatttcaaagaacagtcagaaaagcgaatacctcaaagacgcatatgcagaaattcctctaccctacaacggcaaaacaaatgagcaatacaacatgcagttctattttggtccgaactcatacaatgtattgaaagaatatggaaatgatattgacctgccggatgttattaatatgggctggaaatggattgcttggttcaacaaatattttgttattccaatcttcaatttcttacagaacaatacaactttgaactatggtatcattatcctgttattgacattgattatcaaaatcatcctcttccctttgacctataaatcctatatgtctcaggcaaggatgcgtgttttgaaacctcaggttgatgaaatcagcaaaaaatatccggcagacaaagccatggaaaaacaacaagccatcatgaagctgtacaggcaagctggagttaatccaatgggtggctgtttaccgatgttgatacaaatgcctattttgatagccttgttctactttttcccgggcgcaatcgaattacgccagcaaggattcttatgggctacagacctcgcttcatatgattcaattgcaacgttgcccttcaccattccattttatggcaaccacgtgagtctcttctgcttgctaatgactgcgacaaacattatctacatgatcatgaacaaccgcaatcagccacaaaacgaccagatgaaaggcatgcagacaatgatgtatatcatgccggtgatgttcctgttcatattcaacagttactcttcaggtctaagctactattattttatagcaaccttaattacaattctccagacatggattatccgtaaatttgttgacgatcaaaaattgctcaagcaaattgaaattgccaagacaaaaccaatgaagaaatccaagttccaacaacgtctggaagaaatgcagaaagaacagcagagaagattgcgcgaacagcaaaaaggaagaaaataaacattcaagtatgccaaaatggcaatcatgccttttggcatacaatttgtcacacaacgagtataatgattaaaactttaatgtcatgatctcagaaaaattacaacaagcgctaaacgaccaaatcactgcagaattatggtcagcaaatctttacttgtcaatgtctttctatatggaaagagaaggttttaacggttttgcaaactggttaaaaaaacagtctcaagaagaagtaggccatgcatatgaaatggcaagctatatcatgcaacgtggaggaattgcaaaagttgacaaagttgatgtagttccaacaggttggggaagcctgctggaagttttcaaacacgtttacgaacatgaatgtcatgtatcaaaattaattgacggattgattgaagtagcacacgcagaaaaagacaatgcaacacagaatttcctatggggttttgtaaaagaacaagtagaagaagaagcaactgcacaaggaattgttgataaattgcagaaagccggtgaaggtgcaattttctatcttgatgcgcagttaggtgcaagacaataatgaacgtcacactatataaaaaagctgtctgggaaaaaaacagacagcttttttttatatacatttgcataaaaatcaatttatgagaaaaataaatatttggttcctagttatttcatttattattttagtaattgcctgctccgctctctccatgagttctgttgccagcaactatcgatacacgctcgttgccatgaatccttggaatggagtagaaggaatagcctttacaatcggctactttctgcacacgggaaaagccacgagtctgttaataggcatagggctattgctaatcatgtggtggcgcctctatcttctattgagacgcacattcggacgataaatctaaatacaaaactgataattacgattattttcagtaattttgcccaaagaaagacttttaattcctaggtatgagaaaagacgaaagatataacaaacgcggcgtatcagcatctaaagaagatgtacacaacgctattaaaaacattgataaaggagtatttcctcgtgcgttctgcaagattgttccagactttttaggcggagacgagaattattgcaacatcatgcatgctgatggtgccggtactaaatcatcgttagcatatctatattggaaagaaacaggcgacttgtcagtatggaaaggtatagcacaagatgcattaatcatgaatattgatgatctattatgcgtaggtgctgtagacaacattttgctttcttcgaccatcgggcgtaacaaaaatctaattccaggagaggtaattgctgccatcatcaatggaaccgaagaactattggcagaataccgcaaattaggagtaaatatttactcaacaggcggagaaacagcagacgtcggagacttagttcgcaccattatcgtagattcaaccgtgacttgccgcatgaaacgcgaagatgtcattgataacgccaatatccgtccgggagacgttatcgtaggtttagcctcctttggacaagccagctatgaaacagaatacaatggcggaatgggatcaaacggtctgacctcagctcgtcatgacgtatttgcaaaatatctggcaaaaaaatatccggaaagctatgacaataacgtaccagaagaactcgtttacgccggcaactgtcaactaacagatgcagtaaaaggtacagatgtaaatgcaggcaaattagtcctgtctcccacccgtacatatgctcctgtaatcaaaaaaatattagacaaatacagaaaacaaatccatggtatgatacattgctctggtggcgcacagaccaaagtgatgaacttcgtggaaaatatgcatatcgtaaaagacaatatgtttcccgtgcctcctttgttccaattgatacaagaacaatctgccactccttgggaggaaatgtacaaagtgttcaatatgggacaccgcatggaaatctatgtcgatgaagatttagcagaagacatcattgccatttccaagagtttcaacattgacgcacaaatcatcggacgttgctacgacaacgacgaaggtgaaggaaacaagctcacgatactcagcgaattcgggaaattcacatactgaaccgtgagtttacttcgtaaactttatatatagagaacaagggatgctcacgcatcccttgtttattttctgccaactttcaacatatcacgaattcgaagctttaggttcaattgagtactatcaactttcgctcgtttggaaggcataaatatatctttatacttagctttcgttatcctaaatttcatcttgtcaagattaccggaaacatccagaccggctttgaatggaagtggagattttaaaatagaaatatgatatttaaatgtcatatcaatattgtgttctcctccaaccgctgctttatagcgatcgatttctaccataaaaggaaaaatctccaccgttccgtccttgatagacaaatcaacagatatactatctatcatgttccgctctttatttttaaacatcaacattttagatatttcagcaaaggtctctccatccatcaacaccatattacgcccgttcaaataagcagcaccacgcaacgtaggcaaatcaatcatcaatgtagaatccaaccaagcatcggctgcaatatgaaaatctacggttccggcaaacgaacgcaacataggaaataatgtatctaaatcaggcatcaaatgaaccaaactatccacctgaatatcgtgcatctgtaaagcaaaaccagtataggctttcacggtatcagtagctcgataaacagcagatgtactcatattagcagcagacgacttcaacaccaaatcctctaattgaacacactgatttctaaccacaacctcaccatgaatactatccaaatcaactttgccgaatttgactctatcaacatccatctggaatgtaaaatcaactcttggaggaactacgaaaagcgagcttcctgaatcgtaagagagactatcgctaagaacctcgacctctttcatatcatcaatatctccgtctccggatattgtatctttatatcctgcagctactttattcatatattcagtgcctgtctccaatgccttcattagctgattgcaattaatcatgcgtgaacttaccaataattctcctcgcaacgtatcctttttaaagaaagtacgggctaaattggttattcttcctgtcaaacgcatatcggaacgccccattttcactacagcagaatccaataatatctcattgaaattaaactgcaatctggttcccggcatttttatccgcaatgggaaataaggagtatatgcttgcatacctacaaaatcgacatatccggccggcaaccacattttccgattcttgggattctgtacggcatctacctcaaattctgcatgagccatgttcaaccgattacctagcatacgcattctcaagctatcaacgacgacactgccatgtattttaggaatcttattattacgctttgaaggctctaaacgagcatcagcagtagccttttttaatcccaccaataacgtatcacgaacaataaaaatcgttcttcccaattttacatttgaactcatagatgcaacggatgttgtatcccgcaaaggtgaggtctttatggtcagccaagtggtatccatcaataaacgcactctgttttttacatgaatatccaaccctgaataccctaccagaccattcaacaaatccttcccttgcaaggtttgccggttttcccgattagaagcaaaagccattcctgcgcttttaactttagccacaatactatcctgagggataaagatctctatttccttcgcttgaatacctcctcctgcaaatatctttccatagtctccattttgaatatcactcattaacaccttcccctgcaaaccggcattcaaaacacctctgcaagtcactccatccgccaaaggaaatacttttgtaaaatcttcaaaatccactgcggcattgatttttgccttaaccaacggatctgtcaataaatgctctacttccccctcggcagcgatggtagaacctcctcctaccattttaaaattacgcagctggatatatgaatccttctgtttttccaaatcaacaaaagctttcaaatccatattcaacgtatcaatttgtgatggcatccccggataagcaatcaatccatttgtcacctgaaactctgcaagcaattgaggaatattctgcttcccatacaaaccggaaagagtacctttacacaccacttctccctgcactcttacatcctctgactttttcaatatagcagcaggcactaaatccagtaaggtctttaatgatggtatatgaatcccatatcccaaattaacttccaatacattcaattctgaatttccacgcaaagtacctccggcgccaaaacgcacgccattaatatcgaagactgctttttctagtgtatataaagaagaatcacgattaattctcatccccgtttccacccccaaagcaagatgatttaccaacaacttaccattttcccaaaacaatacattttttgtggaacaatccaattttaaacgggaacgtcttttcccaagaaaaccatccatggataaatccaaaccctccacttttgcatataaagaagtacttctatcatcaaaaatcaaatttccgccattgatacgcacatttctcaagcgaataccagatgtaaaatctgatgtatccgtttgcaacgtatcgatagttgacgaatctacaaccgtagtatccggcaacatcatatcccaatttgccactccggttgaatcgataaaagcatatatcatcggctcatccaacacaaaatctttgatgacaatacgttttttctgtaaataagcaataggattaaatgtcaccaaacatgacttcattgccattaaagaatcgcatgccagcatttcagaacgttcctccacatctttcaatgcttttgaaaccaccgaagcatcggtaatctccagcccaaaatcagggaatgttgaaaaaaatgtcaactcgatttttccaaatcgcaaatccgcattcaaatattctgccgccactttttccaccatcggagtcagcttatcagatgtaaatataaaattaacaacaatccctattgccaacaccgaaaagacaattcctcccaatacactccacagtgtccatttcaaaatacgccgtcctaacggtttcttcatactctcagacataaccactattttaataaatcaaatatttggctcttacatgtttaaacgcctccaattgaggtctccaagaagctctgatttcttcttcattcttacctgcttcaatatctttacgcaactgctccgttccggccagtttttcaaaaaaaggcaagaaaaaagcatttttaccgctataattcctataggcctccaacaaccaatccaaccgcaaacgcttacctgattttacttcatcataacaattccttaaatccattccataacattcttttcccatacatttaggagacttactcatgcctggaatactacggggaatgaatttataaggcatatttttcaagtcaggatgcccaaacacctgaaaaggagtcaatgttccccgtccttcgctcacaaccgttccttcgaacaagcaagtcgaagggtacaacatcacagaaacactatcaggcaaattaggagatggcttacgaggcaacttataaatcatatcacgactccaccccttacaaggaataacagtcaacttgcaattcaccccatctttcagccagttttcgccattaatcattcgggcatactctcctatcgtcattccataaacgattggcaccggatgcataccgacaaacgaagcatgtttcatttccaacaccggcccatctacatagaaagcattgggattaggacgatccatcacaatcatggcaataccattttctgcacacgcttccatcacatagtgaagcgtggaaagatacgtgtaaaatcggacaccaacatcttgcatatcaaatacaaccacatccaatcccgccaaatcggcagcagaaggttttttcttttttccatataaagaaactacaggcaatcctgttgccttatccttatagtcaccgacagcttcaccggcatcaacatctccacgaaagccatgctcaggacaaaaaatacgaacgatttccatcccattctcccgcaagaaatcaacagtatgcttatctccaacaacagctgtttgattggctacaattcctatttttttccctgccaacaatgtcttatacaactcaatattcgcactaccgggagatactgcttgcacacatccaccgaaaaaaagcaaacagaccagtataaacatatttttcatgactattctttttcctcttcttctggtaaatcaatattcatagaataaacgatactttcaacctgacgcaacaaattacgttttttaccatcaggtgcgtacacataccccatcatatacaggacacgattgttcttctggtcaagcacaacattcaatacaaacggtcctcccatataatcattttcgacttgccacaaacctttaatcaaccatgcataatgcttgcctgcatattgataatttgctgccgtcataggagtcaccatatcaagggccatccaagtgctatccaacggtcccggaataaactgtttcagcttttcattcacctcatccaaaataacctgatactccaattgactgacactttcataaggctcttcaaaaaagataaaaccacgactatccactcttgtttcataagaagcccaaacaaagtcggcagtatccttgttaatattatatcctccgggacaatataacaacatatcgtactcatccctaaaagtgtcaaacactttcgtattgggagagctcttataaatatcaatcaaacgatcacgttctgctgccagaaacactctcataattttttctttattggcatcaaacaccttataaaaagcctcttccgtaggtgctacaattcgaaaaaccttctgagagcgtgcccaaggactatcggaataggtaatacttgctgtatcaacactgctcttcaacgacacaatcaacacattccgatgcgctttaacagtcttgtcaaaattagacatcggcaaacttattaaatcgaaaacaggctcaccttgtggcaatcccatctgcggctgcccaaaataagcccggatagaatcccctatcggaccatcccaacgcactttcggtgtaatcaccaatatctcgttaacagaaccggtaacagcctgtaaagctgccttcctgccaccgccttccttacacgaaatcagaccactgcccaaaagcagccccatcagtaaaatagccaatacttttctcataatcgtttattttattgtattattaccttactctcattcggaaccaacaaagccttcaccgaacctatcaatatcttagcttccacaagcaatggcaaacgatattcatctttgctgacccatattttcattccttcgccccctcggaaaacctctccttccaccaataaaggcgaaaaaatataacattctctcttctgtccggctacttttgtctttcctgttcctaaataacggatatacaaatcataaatcttactatcaatcaatatccgtatcggtatcagttcattttttttatagctgtcaaaatccaactcacgcgtcatccaagccacagaaagcatatcatatgtatcagcctttaaacgtacagtatctgtcctacgatatcgcccaatgcgatggacatccccaatcaccaacgaatcattataatgaaacttataatcaaatgtcttgtgataattaccctcatgcgctttacgcgaaaactcaaaagggaaataagtattcttatcataatgcgtaactaacgtatctctgaccgtaaacacccaatcccacgacggtaatgaaactccgactgcttctagcttttgtgcattaggatatttatcagactgagacaatgagaactcaaccctaccggctttcacccaaataatcccccaattatagtaaccgtcatacactaatttctctataggcggatacttctgttgggctgtcaatgccaaacttatccccaaaacaaaagctaataaacagattactcgtttcatacatctttatccttagttacaacttcatacttctttttcaaatcgaactcctgctcaatatcaaaattctgtttcacagaaatctcaataggaaggtatataatttcctccggctgctgatgtttcaaatacaaccccgtatcccactccccattattattaacatccaatacggctctaaccatatatttaccttccggcaacaattcaaacgtcacttgtccatctttacctacctgctgttccctcaccacctgatatttacgttttccattctcagacttcccactctctgacttatacaactgtataatcgtattgccctctacaccctttaccattaaaaacagctttccataactctcctcggtcttcactttgaatttcttatcaaacttatcattaaaacgaccataaatatcataaatcgtcgccgaatctatctctatctgatactctcctcctgctttccattcggcatcgacataaacggttcgcaccttcacgggatcttcttccacttcaaatttcatgggctgatagactgtatccactttttcagacacccgaatatgctttaatgtttgcttgtctatcggtcgcccgaattcaaaacaaaatcgcgttcccaaatccatatcagccgaaacactcggtttaatagacaaaaaatcgattttcggtttttcatcctttttccgcttattctcttttacttccttatccttgaatgtataacgtacagtatcctgataagttacccactgtcctgtactatccgtacgtaaatagcttaaaatcatattcaacgtatcttttttatacactgtcgaatcctttatccataatgatatggtatctttaccggcactttcctccttgaaataccaatcctcctttagtggctctgccgacaacgtatcccacaacaacgccttaaactgattgtcacccgggatactaaaagtaaaattcagacgttcacgctctttccgctcatcatccaccagataaagttgagtcaacttctccaaaaatgcacgcagatacaaattactgggtccaaacgcaaggtactcctgagtcacgatactatccctcataacagtatcctgctcgataatcttatctatcaatctgaatgtatccgttctgaccatcggcatcacaatcggatgcaccgttgtatctatccaagcaaacatctcagactccggagtatacatcttatcccgattggcatcctcaatcgccatcacccgataatctgcctcccgcaaatttgtaactctaaaattaccggaactatctgtgcgagcaatataatcaggcaactctttcaaaggaatagaatcaccttgtttctcatacaaagccaccagaacacccagcataggctcatacgactcggcattcaccaccgttccacttaattccagtgtatcaattgtttctcctgtagaaaacacataacgataaaatcccaacggatttccctcattattatcaacaatagcatcagcaaaatccagactataagtcgtattcgggcgcaatgagtcaggaatagctacctgtacatatttccctttcaaacttactttcgggtctttttttaccggtggcgaaaatatgaacttgttatttatttccttcaactgtacaaattcatcaaagtatatattcactcgcttacccttaaaattcgtagtaaacgacataggctgctccatcacaacctgtggaggagtttcatctttgggccctccttccggatatcctcgatttgcacaagcatgaataaaaactaccactgcgattatccccagccaatcccaacgaaaaatattttgattttttgcactcatttctatctcatttttatttattatctgcccatcttcaaaggactatcggacaaaaataatgattttctttttaaaaagcaggtaactttccatacaaaacatacaacaaaaaacagatataaaaaaaaggttccgagctatcacagcgggaaacctttactactaactaacctaatacaaacttatgaaaaaaaatgtacttattatataccaaaaaccatgccaaagtttcaatctacaatgtatctatcgaatgtctttacaacaggcggtctctttagctacggcattcccacccttcaacagtccccgtcttggaagaaaaattcaccccgaccttatacaactggcgagcatcggattcatacggacgggcataacctttctcctctatctgtcgcaatgcatcggctgccgtgccatccaacttaaattcgaagatatacacgtattgaggcgtttcaacaatacagtccacccgaccttcgctctgctccttttccaccaaaaccgtataaacactcatcagacgaagcaacaaataaaacgtatagtggaaataacgctcccgttccggctcgttgtccttgcgccgcatgctatagggaatacctgccaggaaagaggtcagcattttgcgaaattcttccaattgcccccgctttaacgcaaataccgctttcaccatccaagactccaaaggcatacgacattgcagatagttcgtcgccaccattgccagaaaaccgcttttgacctcattgttgggaaaatcaagcaggaaaaggttcgaatccttgtcgtaatccttaatcgtcagataaccactctgataaatcatcggcaatggatactctacatcagccttgtaattgataaactcgtccggaagataatacttattggtcagatcatcaatcccctcatggaaatgattcatcaaccgaatcaaataagatggcgtaccgctggtgaaccaataatcacgaatatccttgctatcgaaagcattcagcagactgaacggattataaatatctgccatattcttgctaaagtgataaccgtcgtaatgccgcttcaaccgcaggcggatttcctcttcgctacaaccgtccgactctgccatctcacgaataggttctgcaaactgtgtatacagttcctcttccgtaatgccacaaagagcttcatatttatcaaacatactgatatccttgggttggttgaaaccactgaacacactgacctgcgagaatttggtaacacccgtcaggaaaacaaaacgcaaagaagcatcggcttgcttaaacacggaataaaaagccttcaatatatcacgattccggtccaacaattcaggatccctctccaatacatccagcaaaggcttatcatactcatccaccagaaccactgcaccccggcccgtctgctctgccgcaacctgcaagattcggttaaaacgcaaaccatattcttgggggacatccgttacaattccgtattcccgctcccactcggaaagcatactatccaatacccggtttaaagcaccggattcagtgaaattgattccgttaaaatcaaaatgaaacacccgatgcacatgccagtcctgctccagcgcatcgattttcaagccggcaaacagctccttctttccctcgaaataggcacggagagtggaaagcaacagactctttccgaaacgtcggggacggctcagaaaataaatttgcccttctttgactaatgaataaattaaatcagtcttatccacatagacaaaaccgcctttgactattttctcgaatgtctgtattccaaccggatatttcataaatctcctgcttttgaagttcaatattgaatacatacaaagttaagcaatttatttgaagaactactttggaaaacaaaaaatcaatatccaggattttgctttatttgcatatcaaacaataacacctctatagggataggccataaaagctgatagatgttatcgtagcttaaccccataaaagattcgcccaacccgtttcttctgatgaaatttatatagctaggtgaatgtatttgataatgcaatgaagcaatggctttcagaacatcagactggtcaactatgagtttcttatgctcgcatacctgattaatgtattctttagccttgggaacgtttcctgtgtgatacaaacattcggcagctgtcagcaccacatccctgtaatcaagatacggtatacacaattcatcacttctagttccacccatataccccaaaatacattccgaattattcctatactcagcagcttgagtatattccaaatggtaagcacctccctctatcacctcctccaacagaggcaacgcttcatcaaatcgcttttgattacagtaaacaaaggcaagcagtgtccttgccacatccttggacacaaacagcatgctatttgcatcgccgaaagagtcgtaacgccactctcccaagtcagtcatcgcctctgtcagcataccttccaattttgaaagcatttcgaattcctttatctgaggaaacccggagccggaaatctcattatccaatttaaaaggcacattaccccaccgtgatgacaattgataatatgccaaagcaagatgagtattgacaaacggctgataacaattcagcatgtctgcatcagtatccctcaacattatcaagcctgtaattgcggtataataacaccgccaagcccgactgattctctcatcatccggagcgtacgggatagggctcttgctgtctccttgaataatatagcgtccagcctgcatggcatcccgcatattgcacataaagttgagcaccgcctctttacccatatcgccaagtctcacaggatcatgcttcagccaataattctcatctccctgttgtttgatggttaccgtagcagcacttctgccccttgcattgtacaccgtaaaggtggtagacaaatcctttttgaattgtgccggttctatctttacggtaataacattgttttcaatagttttgttgtactttattgaagaggtcgggatatttgtgccgggttcatataatccaaagtattcttctgtaatatggtcttggggcaattcttgaagaccggaatcatcgtcagtgtcaaaagaaggtggatttaggtagaaagtcttgtccgacttaacagtaatagtatattcgccaccttccgcaggaacattaagttcgctagcactcagtgtaacggattccgatccatctatttcgtttccggcaataccgtcattatcccagtcgaaataataagccaagtccttgactttaacctctaaccctaaatccttgtagcggtttttaatattctcggatattctatccaatctggcattcaggtagttcttgccggattgtatctttttctttgtttcttgactgaaagcaccttctttgccaaactcatcacttagaatggatagatattcaacgatttctgcatctgacctatctgttagtaccaatgaagaaatggctatcaaggcaccggaagcatcatcaccggaagtaagtgagaattggctcgcatctttagaagcgtattgctgtaatccgaattgggtaagcaattctttttgggcttgtgcattagcttccttgaatgtcatacctttggttgtaaccaaatgatgaatgcgcttacttttcaagtgggtcaatacattgacattgatggtactgttgtctttcaagtccacaatagcatccagcttgatagtaccttccgacaattcaccatccacttcattaaaaaaatagccgtctgccgtcagttgggcatacgggctgttgattttgagtgcaccataattgaagtcacccatgttgttgtcaatggtagcggaataaaaacttccagtaggagtcatgtactcgtccaatattcgcatatttacatgagaaccacgaatcatcggacctttttcaactttccccataacattatagactgtaggcttaaaatcacctcccgtttcatcatcatcgctgcaagagcaaagagtaaaagcaagtgcagcagacaaataaaagtacttattgaatttcatacgatatgtgtgttatatgtttccatattccggttcagcccctaacccagttccattaaaccacaaagcgtggaactgcaatgtcctacctcctaagttgacggtcctgagaaaaccttgtgtacagatgtagtaatagcagcccacgctatagcgtgagaaccactatgctatccttgtacacgtttgaaagtttctcaggttttcaacttacaagataagcataacgcttcttcaaaattctaatatgtctggacagagttccctccatccgcttgcaaagatacgcaattttattgaaatccaatcaaatactatcagattataaacagaatttctgttttccttattaccaatcttatggattccctaaagaattatatctgtagattacgattggtgccaacatatcttcttctattttattggtgttacttatacataatgtattgcatccactctgtatcaacgtcttttaaggaagatgtttttaccacggttttatcattctctcttttctctatataactaaatccatttttttctttgcgttccaccaatgaagcagtttggacaaatataccattcctaaactcatatttaatgtgttcatattcatttgcggaagtacggttaaaagagtaaatgcatcgagtatcattgtttatagttggattcgctatctgttggaatgagggggaaatcagaaacttctgctttttgtcattccataagtaacattgatagtattgtactccttgattgccaaatgcccccaaataaaccactaaatctttcttgttgtcgaagttaacatcttcgtaagttgttttacctattaactttacatccattggtttaccatattcactccaatcataattgcatatgatagactgcagctcttggttggacctgtatatagtgattttattccctataggttcttgtaactttgaggaatcttgatatagcagttgatttgaatagactattgaatcattcttgtatgaattgatatcgggagtacttttaatggtattggtattgtttttacgttgattgcatgctgcaaaacaaaacagcatacagaagcatgtaatgatgtatattattctcatagctttgtgtgattaataagttcttataaatcggttatttaaaacaatcgagtgcacccattagctaatactcatgccgagcatactaaaaaaggttccgagctatcacagcgggaaacctttactactaactaacctaatacaaacttatgaaaaaaatgtacttattatactccaaaaaacgtgccaaagtttcaaaaaaataatacaatccgataaatatctcctaaccatctccatattttctctcactcctcttcctctcaaatatatcacaaagatatatcaactataagacaactatatatcaaagataacaaaccattatctttgatatatagttaccatacttttgacataaaaataaactatctgtaaatttgaccgaatcagaacataaacataagaaaaactgcacttatccaccaccccattcacatcgtcctggcaagacaggcaagactgaaacggacatccccggcttccgccaacgcctcaagacacgctccgacggtagcacctgtcgttatgacatcatccaacagcagtatatgacgtcctcgaatcaattcaggatggcgcaattcaaaaatcccggacacattctccaaacgctcagctgcgtttttgcccgtttgcgacacattattgcgcttccgttccacaacattgtccaaaagttccacacctaacacctcacacactccccgggcaatctctcgtgcctggttaaatccccgttctcgttcacgcttaggatgcaaaggtatgggaacaacacaatccgcacgacaagagcgaataatcttctgacccaacatccgtcccaaatacacacccaacttacgattagcatgatacttgacactatacaccaattttctgtaatcgctatatttgttataatagaataatgcatgcaatgcctccggacgaaaattttcattaaaattatccagcacacttctatctgttgcaaaatcttcgtcaacaaaagggaaatcagccaaacaagatgtacataaataattctctccacgcaccaagacagaaccacatacctcacacactcggggataaaaaagatccaatagtgccgacacccaagaaaaacgttcaaaagaaatcaatgccctatccacaaccttgcaatttataacaaaataatcactgctttacaaaattataagtaatcgtccccttctgctgagcaggagcgtcagccttatcattaaagcgagaacgattggctgcatcctcagcaactctccacaaacgctcgtcaggagcagactgaccttttattacatcagcctttatcaccacaccccggggattaacaacaacttccacgaccacccgaccacctgattcgcatttaaataccggtatcggtaaaatacgggcataacgacctttcaaattataactaacactactctccccggaataaaaggttgatttcaacgaatcaagttcttgttcacgcaaatctcggacacgttgcagactatcttgtttataatgcttgtcacgcttcacttggtaacgaccatcatcgccagcctcacgcaattcatctaaaatctcattgacataatcctctacactggcatcagccgtctgcttattttgcgctgtaatattctcatttacggcaatagaacgcaacatccgttccacctcttcttcggatgttttctgacggatttcttcctgccgctgtttttccaattcctgtttctgaatttcttcttgctccggcacatccatctgaatttccatttccgtatgcacacgaacccttgaaatctgcatactcataaacaaaatggcaatcaacaaatggaatatcaccgttcccataattccatgacgatggagtataaccaattctttcagtttcattattcaaatcttatagcttttatcggacggatttttgataccaaaattgtaggaatcaccaacatcaatacagaaaccaacaaaactcccatattcaataaaatcatcgccccaatatttatacaaaccggcactgtgtccatataataaacctccggatcaagctgaacaatctgcaaccaatgctgtaatcctcccaaaagcaatgccaacagattaccaaccagcatacctttggatatcaatccaattgcaatatataaaaacaacttctgcaaacgaatattccgataacccaatgccttcaaaataccaatcaatgctgttttatcaagtatcaaaatcaaaagtccggacaccatattaaatccggcaacagcaacaataagcgtcaatatgatcacaacattcatattaagcaaatccaaccaatcaaatatctgcggagccacatcatgtaaagaaacaacccggaagcagctatttaccccatccaaaggaaggattttatcaattttttcctccacctgagctattttcggaagttcaaaaagctccactccgactcctgtcacctcattttcttgccaaccgttcaatttttgcaaatgacgaatatcgcacaagacaaacatgtcatcgtattccttaaaacccgtattataaacacccacaaccgtaaacattcgcacacgaggagggtcctgcacaaaatgtgatgcgatacgatcgcccaccttcacctgcaaaagacctgcaacagaagctgataataaaatttcgttagaagcttttaatccgttcaagacaggcaaacggccggcacttaaatgccgtccataaaaagaagcatcataaagcgaatccactcctttcaacataacaccatgaatatccgtatcgcttttcagtatagatggtttcgtcacataacgagcaacctgcttcaccccatcaatccgacacaaagcacccaacaaactatccgtcacaatcaccccttgccccgcatacaaagcgtcctcatcacatgaagtaatttccaaatgagaagtaaaaccagacaacttatctgtaatctcctttttgaatcccatgatgataaaaacagacaacagcatcacacaaagccccaaagcaatccctaccactgcaatttttacaatcggtactgagactgtatcacctttaccgcctcccaacaagcgatgcgctataaataattccagattcaaaacaatcacttttcaatactgcacaaagatagagaaaaaagtctgtcaaaacgacaccacatctccctaataatccctagtcgttatctgcaaacgttataaattagcctatttataagttaaaatacatgaaacactttctttttccaacaaaacactgtaatattgtttcaaaatgtaagaaacaactctataataatcatgcaaaataatcttattgacaaacaactagttgactcaactatggcacaatgcggagtaagcaatctcgatgacgcttccatccgcgacacagtaaaaatcgctaatatattggaaaaagcaaccggagaaaaattcattcgtatggaaatgggtgttccgggccttacgccatcacgcattggaaccgaagctgaaattgaagctctgaaaaaaggtgttgcacaattctaccccatgttggaaggctatccagaactatcaaatgaagcttctcgctttatcaagaactttatggacgttgatattcgtccggaaggtattgtacctacagtaggagccatgcaagcttcatacgttgcatttatggcattaacagaatgccatgccggcagagatactgttttgttcattgacccaggttttcctgtacaaaagacccaattggaagtcatgggcaaaccatatatcacgtttgacatatatgagtatagaggtcagaagctggaagccaaactaagagaatatttagataaaggcaatattgcaagtattgtatatagcaatccgaataatccgtcttgggtatgtctgactgcagaggagttgcagattatcggaaaattggcaacagaatacgatgttatcattctggaagacctggcttattttgcgatggacttccgcaaggatttatctcatccgggagaagcaccgtttcaaccgacagtggcaaaatacacggacaattatatctgtatgatttcaagttctaaattgttcagctatgcaggacagcgtttaggactattgtgtatttcaaatgcactgattaataaagaatatcctcatttacaagaacgctaccactcagcaaaactgggctataccatcacctataaattaatatatacattatcatctggtacagcacattcaccgcaatatgcagtagcagccatcatgaaagcagctaacgaaggaaccattaatattttaactgatgtaaaagaatatggacttcgtgcagcaaccatgaaaaaactctacaccgacgcaggcttcaaggtggtatatgataaagatggtgatgatgatgtagccgatggtttttattttaccatcatgtatcccggcatgagcggtgcacaattggcacatgaacttctttattatggaatatcctccattactttaaaaggttgcggcagtaaccgagaaggtttacgagcttgcgtttcacaagtaggcatggataaaatggaagcgttgaaggaccgcattgagagattcagaaaagaccatcagtaatagcactgcaggcattacagttaaaaaatcagaaggtcctagaaaaatctaaagatgtttttgcagttctgattttaaactgtaattttatacccgcatacgattacgaaacattacgaaaaggttaaaatattcgacaatttataattttaaaattatggcaaaattcagaggagcaattgttgtagacacagagcactgcaagggatgtaacttgtgtgttgtcgcgtgtcctactcacgtactggacctgcaccatgacgtaaatggaaaagggtatcactattcctatatgaaaaatcccgaagcttgtatcggttgtgcaagctgtggattagtatgtcccgattcagtaattacagtttataaagcagaaatcaaataaatgtaaagatatggcagaagtaaaattaatgaaggggaatgaggtaatcgcagaaaccgctatccgttgcggatgcgatggatatttcggatatcctatcaccccgcaatctgaagtcatggaaacgctcatgctgcgcaagccatgggaagaaacaggaatggttgttttgcaagccgagagtgaagtggctgcaattaatatggtatatggtggagcatcttgtggtaagaaggttatgacctcgtcatccagccccggtatcagtttgaaacaggaaggtatcacctacattgcaggttcagaacttccttgtttggttgtagacgttatgcgtggaggtccaggtctaggtactatccagccatcacaaagtgactatttccaagcaacaaaaggtggtggtcatggagactatcatttgattgtattggctccggcatctgtacaggaaatgagcgactttgtcgttttaggattcgaccttgctttcaaataccgcaaccctgcaatggtattggctgatggtgttatcggtcagatgatggagaaagtggttcttccagactatacaccgagacgtactgaagaagaaattgaaaaacagtgtggagactgggcattgaccggcaaaaagaatcgcgaacgccatgtcattacttcattggaattggaagctcaccgtcaggaagttttcaacgaaaaattacaacgtaaataccgtgaaattgaagcaaatgaagtacgctacgaaatgttgaactgcgaagatgcagactatatttttgttgcatatggttctacagcacgtatctgtcaaaaatcaatccaattggctcgcgaagcaggtatcaaagtaggtttgttacgtcctatcacattatatccgttcccaatgaaaccgatttcagatttgtgcagcaaagtgaaaggtttcttatctgtggaaatgagtgcaggacagatggtagaagatgttcgtctggcagttgatggacgtgtgaaagttgaccactacggacgcatgggtggtgttgttcctactccagaagaaattgtagtagcactgaaagaaaagttttcgatttaatcaaaactgtaaactaagaaaaacatggaattaacagatattataaaagaggaaaatctcgtactaaagaagagtagcctcctcactgacaacgtaatgcactactgcccgggatgtacccatggagttgttcacaaattagttgcagaggtgattgaagaactgggtatccaagatcaaacaatcggagtttctccggtaggatgtagtgtatttgcttacaactatattgatattgactgggcagaagcagcacacggacgtgctcctgctgtagcaacagctatccgccgtttacatcctgaaaaatatgtattcacctatcagggagacggagacttggcatctattggttgtgctgaaatcatgcatgcatgtaaccgtggagaaaatattgttgtcatctttatcaacaatgcaatttatggtatgaccggaggtcaaatggctccgaccacattgttgggtcagataactgcaacaactccttatggccgtgatgcaaaattgaatggcttcccgatgaaaatcacagaattgctcgcacaattagacggaacttgctatgtaactcgccaaagtgctgatactcctgcagctgtaagaaaaactaaagctgctatcaaaaaagcattccaaaatacacgtttggataaaggtctttctttcgtagaagttgttggaacatgtaactctggctggaaaatgacccctgttgatgcaaacaaatggatgcgtgacaatatgttccagaaatatccgttgggagatatcaaagacatttaattaattctcaattttcaattagtatgacagaagaaattatcatagcaggattcggtggtcaaggagtactttccatgggaaagattctggcttattcaggaatcatgcaagaccaagaggtttcatggatgccttcttatggtcctgaaatgcgtggtggtacagctaacgtaactgttatcatcagcgatgagcgtattagctctccggtattgaatgctttcgattcagcaatcgtgttgaaccaacagtcaatggataaatttgaatcacaggtaaaacctggtggaacattaatttacgatccgaatggaatcactcaccacccgactcgtaaagatatcaatatctatcagattgaaggagctcgcttagctgcagaaggaggaaatccaaaaatctttaacatgattattttgggtgctttcttgaaagtaaaaccgattatcaacttagaaaatctggaaaaaggtttacaaaaatcattacctgcacgtcaccacaaccttattcctatgaatattgaggctgttcaaacaggtatgaaacaattggttgttgtaaatgaaatttaaagacctaactctcaccttacaatgagaaattagagctgtgctaatacacagctcttttttatgaataaagtaaaaaaaaatagcggaattgattcccgctatcatttttattgattacttattacccaaccatcacaaccaaatactttgtctgcttccaaaacgccttttcatcattgatttttaaaaccaaattaccatcttcatctgcttctaatacataagaatcggctggatgtgatgaaagaattttcgcttttttattattcagaggaatattcttcacttcacgtatatcaatacttataaaatctgcattctgagcttgtgaagaaacaatcggcggacagaatataccttgacgcgaaattactgcagcttccttcaactccttacgggtacctatcaaataattagccatatggattgtctgatcctgttctgctatcgtaatttgttgcgcttttgattctttacccaaagaatcaacattttgagttaaaagctttacctcttcaacttttactgccaactccttattagtagctgccaactgacccgtaatctcattgatcttttctgaacgcaattccaattctgcatttaaattagcaatcattcttttaaattctgcagactggcttttactctttccttctaattttgcaatctgagatttatagcctgcaatagcttcagaaattgcctgaatatcgttctttaagcgagcaatctgctgctttgatttactgcctttactttctttttctgcctccaatgtcagtaaatgctctgcttctcttaatgactgcataccggctgtcaaatcgttaatatcggcaagcaattgctccatttcctgattttgctgcattgctatcgcattcaaagaatctgctcgaactaataacgctttatatttttgtgaattttctacacaactactcatcaaaaatagggaagcacccaatcctaaaacaataaactttttcataatttcaatttttagttttaattctgaatattaataacacaacatttataccgaaacaaagcacaaaatcttatcattgatattcaaatacatacaaatgtatattgcttatacaattggggaaacatgaggaataaacaaaaaaaatgaggaattattccccatttcctgtctacaaaagaaaatcccgagaaaaattcccgggatttatttactatttacggtaatcataaaaacctataccggtcttacgccccaaaagatttgcacgtaccattttacgtaacaatggatgaggacgatacttagaatctccaaactcgttgtaaagcacttccatgatagccaagcacacatccaatcctatcaaatctcccaactccaacggtcccatcggatgattagctcccaatttcatagcagcatcaatttcttcttttgttgcaacaccatcagccaaaataccgataccctcattcactaacggaatcagaattctattgacaacaaaacctggtgcttcttctacacttacaggtaccttacctatttcttgagaaagagagaataccttatcatgcacctccttagaagtcaattgacctttgataatctctaccaacttcatagctggcaccggattaaagaaatgcataccaaccaccttgtcaggacgatttgtagcagcagcaacctctgtaatagacagagatgatgtattagttgctaaaatagtttccggcttgcaaataccatccaacaacttgaaaatttcgtgcttcgtagccatatcttcagcaatagcctcaataaccaattctgcatcagcacaatcttcataattcatagtatctgtaatccgcgccaaaatagcatctttggcagcagcttccaatttgcctttttccaccatacgggaaaggtttttatccatagctttgtgagcttttgccaacgaagcttcagaacgtcctttcaacaagacatcgtgtcctgcctgtgcaaatacttgagcaataccattacccatcgtacctgttccaacaacgcaaattttcataatgtataattttaatttcctttaaattctggtttacgcttctgtaaaaatgcctccataccttccttctgatctgctgtagcaaaacacattccaaacaaagaggtttcaatatcaatgccagtctctatatccgtttcaataccacgattaatcgcctctttggaataacgtacagccaattgtgcttttgtagcaattgcattagccatctcaagagctttatccaacaattcgtcgggagctaccaccgcatttaccaagccgatacgataagcctcctcagcattaataactgcagcagtatatatcagttcttttgctttccctatgcccaccaaacgcggcaaacgctgtgttcctgaaaatcctggagtaattcccaatcctacttcaggctgaccaaacttggctttggatgaagcaatacgaatatcgcaagccattgacaattcgcatcctccgcctaaagcaaagccattaactgctgcaatgaccggtttttccaacaactctattttacggaaaacggaagcacccaaacgcccgaaagatttaccctctgccgcttgttttgtacacatttctgcaatatcggcaccggcaacaaaagctcgcccttcaccggtaagcacaattacatctacctctacatctgacgccaactcatcaaatgcttgatccagctccaataaaatagcagtattcaatgcattcaaagcctcgggattgttgatttttacaactccaatacgattttgcttttctattatcagtttttgatattccatttgctttgaattttacaacaaactaacctttatcattaactatttttttgtcaaagcagccaaacgctctgtcaacaaaggcacaaccttcttcacatcaccgacaatacccaaatctgcaacattaaaaataggtgcatatttatctttattcacagcaatgataaaatcagactcctccatacctgccaagtgctggatagctcctgaaatacccatagcaaaataaaggttcgggcgtacagtcttaccagtttgtcccacttgacggtcatgcggcataattcctgcatccaccattgcacgtgaagaagaaacctctgccttcaatgtacctgctaatttttccaatgctgcaaaaccttctgcatttccaacaccacgacctcctgacaccaaaacttttgcctcggtaatatcaatcttgttcttctgctcctttacggtttccaacaccttcactttgaacttagacttgtcaaagttaatgtccaacatctcaacagttccttggcgattttcgtctttttcttttgcacgcatcacacctggacgcacagttgacatctgaggacgatgatctttacatacaatcgttgccatcaggtttcctccaaatgccggacgtgtcatcaacaaatcacgatcgtctgaaatatcaagaccggtacagtctgccgtcaaaccggtttccagacgggcagacaaacgcggtcccaaatcacggccaatcgttgtagcaccaatcaatacaatactcggtttacgttcatgcaccacttgagtaatagcctgtgcatacggttctgtaacatattgaaccgattcttttgaatcagcacacaaaacaacatcagcaccataagcaatcaactcttgtgctttatctgctatctcatagcctaacaatacagcaaccactttttcattcaggctgtctgccaattcacgagctttgcccaacaactcaatagccactttctgcacctgaccatcgcgctgttccacaaatacatatacgtctttatattgagtcttatccataatatctatcagattataaatttctctttcagtttttctacaataatatctacagcctcagctggctcaacttcaaacaccttacctgcagatttggcacctttggtaaatgatttaaatacacgcgttggagaaccgttcaagcccaatttagcttcgtcaacactgatattactgtaattccaaacttcaacctctttgttataagcctcaacgataccacgaacagacatataacgagccttgttagctgttgccaatacagtaaccacacaaggtccttctacctctacaatctgatagccttcttctgtagatttacgaatagtgaaagttttatttccgtcaaacttcaaatcttcaacataagtcacttgaggcaatcccagatgctctgcaatctgtggtcctacctgtgcagtatcaccatcgattgcctgacgacctgtaatcagcaaatcaaattccaacatacgcaaagctccggcaatagcattcgaagttgccaatgtatctgcaccggcaaacttacggtcactcaaatgaatagctcgatcagcacccatagcgaaagcctcacgcaaaatatcatcagcctgaggaggtcccatagtaatgacagtcacatgagctccatatttatcttttaactgcaaagccatttcaagtccgcctttatcatccgggttcataatacttggcacaccatcccgaatcatggttccggttttaggatccagcttaatttccgtagtatccggaacttgtttgatacaaactactatcttcatgtttatatattttctattgttttatacctgattatttcaaaagagcagcagaaatcaccatacgctgaacttctgaagtaccttcataaatttctgtaatcttagcatcacgcatcatacgctcaatcggatactcacgagtatatccgtaaccaccatggaactgcactgcttttgtagtcacctccatagctgtttcggctgcgaacaatttagcctgagcagaatctacggaataaggcattttcttgtctttcttccatgcagccattctcaccaacaaacgggcagcctgaatcttaacctgcaaatcagccatctggaattgtgtattctggaactgaccgatagcacgaccgaactgtttacgttctttcacatacttcacagtttcgtccatagcaccttgagcaatacccaaagcctgagaagcaatacccatacgtccgccatccaaagtcttcattgcaatcttaaagccttctcccaatttacctaacaaattagccttcggtaccacacaattttcaaaaatcaactcacaggtagccgaaccacgaatacccatctttttctccttcttgccaatagagaagcctgggaaatcacgctccacaatgaaagccgaaatacctcttgtaccctgagatttatctgtcattgccatcacgatataaacgtgagcataagcagcattagtgataaaaatcttagagccgttcaaaatataattatctccgtcttccactgccattgtctgctgagcagaagcatccgttccggcattcggttctgtcaggccaaacgcacccacccattctccagaacataacttaggcaaatatttctttttctgttcctctgtaccaaattcataaatcggagaagcacacagagacgtatgagcagaaacaatcacaccggttgttgcacataccttagacaactcctccactgccatcgaatacatcacattgtctccaccggcaccgccatattctactgggaacggaatacccatcaaccccaatttagccatcttctctactgtttcaacagggaatctctcttcctcatctacttcagcagccaacggcttaacctctttctcagcaaactctctgatcatctgctggaataatatctctttctttgataatgaaaaatccataatacttttaatttatcaatttatcaacgccctatcgaaacgttgaattaacacattttcttcaaatcaggtgaaataatcaaagtcgcttcagtagcagcctgcacctgctctacggtaaattcaggatgaatctctttcaatacgataccttccggagtgatatccatcacacccatttcagtaacaatcatattcacctgtcctttagcagtcaagggcaacgtacatttcttcaaaatcttggcattgcctttagctgtatgttccattgccaaaatcactttaccggcacccatcagcaaatccatagcacctcccatacccggagtctttttgcccggaatcatccaattagccaagtctccctgctcgtccacttgcaaagctcccaaaatactaacatcaacatgtccaccacggataataccaaacgaagtagcactatcaaagctagcagctcccggcaatgcagtaattgcaccgcctccagcattaataaagtcaggatcttcctctccggctgcgggggtcggtcccataccaatcagaccattttcagtctgcaaaatcacctcaactccttccggcagatagttcggcaccaacgtcggcaatccgatacccagattcacaacatctccatctttgagttccattgccactcttttagcaatgacttctcttatttgctctttttccatagtctatatgatttatcttaagttcatttctcacttgttcagtcgtcttgctaactcctgagccacaaacgaagccacatcgtcagcataggtattcataccgaaaccggcatcataccccaactccttagccagttcatgcgaaatacgcggacctccacacaccaaaatcaccttgtcacgcaatccctctgcctccaacatctctaccaactccgtcatattcttgatatgcacatccttctgtgtaacggtctgagacaccaatagagcatctgccttcagctcaatagccttagcaataaactcctcattggtcacttggcttcccatattcaaagcatcaaacatctcataacgttcaataccataatgcccggcaaaacccttcatattcataatagcatcaataccaacagtatgagcatccgtacccgtactggcacccaccaccacaatcttacgtccgatatgctcacggataaactcatcagtttctgccatatcccatttcgtagactctactttcggaacataaatatttgaataatccaccgtatgagtgcaattaccataacaattaaagaaggtatatccttccgtcaattcctgatgaaatacaatctgcgggttttcaaaacccattttcttcaacaactgtttagcagcctcaatagcctcatcacctgccggcacaggcaaagtaaaactcaattgagtcttaccgtcattcattgtgtccccgtagggttttatcttttttaaatcaagggtctgatcaaaatccttaccttctgttgaatataaaccaccgctcataataatgaaaattgaaaatgaaaaaatgaaattattccaccgttttacgcatcaatgcaataaacggattccagtaattcttgcctttggcactaacaccatccaagcctttacctccatttttaggacgcttgatatcagcaaaaattcctttttccaaagctgagaacaaaccttcctgctctattctttccaacagaactgtcgctttgtccaacaccagctttgcccggttctgaataattcctccttctttaaacaccacctcgtctccgatatttctcatgttattgaaaatataacgggcattttcaattgacagataacggtcggacataaaaggcgtatgaattgcctctgtcggcatacccaacaactggataccctgagaagtccagattcccaccatgttaaacaaggcatcctgaatatgtcctctaaaaatattaccggtcataaatttcgtcggaggcatatacttcagggttgctctcgggaaaatttcccgcgtcatctgagcttgtgccaactcatacaagaaaccgttttccagcatcgggtccatctcgaaagcatgtcccaatcccatctgctcttccggcagaccggccaacaaagccaattgctcattgataaaatcagatgccaacacagtatgcgcttcctcaacggcatctgctgtcgtcagataattatcttcaccggtattgataatcacaccggcaaaaccattaattacacgcgacataaactggtcaaccaacgtgcgttgcatattgatatcacggaacagaattccatacagggcatcattcaacatcacatccaatccctccaaagctcccattacggcaatttccggcatacaaagacccgaacaatagttacacagacggatataacgtcctacctcttcgcctacctcatccagagccttacgcataatgcggaaattctcctgggtcgcaaatgtaccaccgaatccctcggtcgtagcaccataaggtacatagtccagcaaactctgaccggtggtgcggattacggctataatatcagccccctggcgagcagcagcctgagcctgtaccatatcctcataaatattaccggtagcaacaatcacatacagataaggtttcggtccctcaccaatcgttgctatataattttctctccgttggcgatttgcctgaatacgggagatacttgcgtcaatataaggcttcaaagcagcctctcgttgctcctgcgaacagatatcaatgcgggtaacatccaattttccgtcagccacctgctctgccacctcctggggagacaaaccggttgccaccactgcatttcccaagaaaaacaggacaccctctcccagaacatttttgtctttcagctcatcaaccaccacgttaggaagcggcaccgcattgccgtccactccgtcaatgcccagcaaacggcacaacgttctttctactgcaacagttgtatacccgtctacaaatccctgtacctggtctgcaattttccgggcgatgccacgcgcatgtgcaactttattaaaatcaatacctaatttactttccatatatattttactttactgtactacccttttttaatttcattcaccacctcactcaaactctcttccgctctttcaagcaacattttatcaacccccagaagagcagcgattctcaatgcttcatgcggcacctctcctccctgatcctcttccagcgaataatcgataaaatcatttatatttttccaggtcacctggccttgtattttctcttctacaaatcctctcacccgcaatttacgacaaggagctacaattccgctataatgtgtcgtcaccaacgacatagcgccatattcagtcaaaaagctgaccactccgttcacaattgcccttccctccaaaggattcgttgtacgtgccaattcgtcaatcaacaccagcacccgcttcccggctttcacccgttccacgatttcgttgattctcaacatttctgcagcaaacgaagacaaaccgctcaactcatcctgctcatcaccgatactggtctgaatttcatccaccaataccatctctgcctcggcagccggcacataaaaaccgaattgcaacaaacattgcgccaaagccacactcttcaacaacaccgtttttcctgccatattggctccggtaatcaacgtggcacaaggcaacaacattatatccaccggctgaaaacgcttgcccttctcctgcaaagttgcatccaattgaggattgaacaaccccttcagcatcgttttatcccctccgaatcgtggacatgacaaatgcaaaacaacagcctgctctgccttagccaccaatatatccaaccttcccacctgcaccaaagcctcccgcaacgcatcagcctcctctcgcaactgctcagacaaatgctcccgcacaacatcctccaactccacacagcgcagatacaactgttcagtctcctgctcatcccctccctgctgtttcttcaacttcaattctgctctcaaagcagccaattctgccgaataacaatcataaatataaaaatgaggaatcttggcaccttccggatccaataactccaccactcttccaacatcaggaatcttcacacatttccactcagcagtcaacatcctcatctcctcggccaacagcacaaaacttttcaattcaaacaactccaaatcgtccaacaccgtatgctctcccgcatgcttcaccgttccacggatatccctcacctgcattaacagacaactcaacttctccaccaacgactttccttctcttgtcgccattatcccaataacctccgtcacccgatccagttccgcaccgatttcctcctctgtatttagccaacacatctcataaaggctcctccgtcctaatgaagaacagatattcaattgctccgtcatataacggaatcccttcacttgctgtattgcttctcttactatcattctattctctttacatcataaacaggcaactccaaagcctcctgcattacatcgcgcaatctgtcagaatccaaaaccaatccggaaggcgccaccggattaatcgttacagccaataggcggcttctatgcaccaccttcagacttccgcctttccgaagaaaagcataataagattccggtttcgcaaaaactcgtgtaaagtcacggataatcaactccaccggttgcttttgcaccctcagatactgcagcaacttatcgctgacagccccggctacaaaaagccgattaccaaaacggaacaaatctgttcccattttttccagcataaagatagaaggcaaatgcaaatccaccacctttccttcgctgtcaattgcccagacaccttgtcctactccgtccaacacatcctgcaattccgtttcaacctcctccagtccaatcaactcatacacaaacttagtccttctcaccaactccggaatattaccggatactgcagctcctgtcgccaaaaacatggcttccgtcactgccggtgaagccaggctcaaacgagataaagccccgtctacaatcgttgtctgaataccattctccttcatgcgggcaatcaaaagcttcaatccacccgtatctgccggccccgacagcaacaccttcccggaggtaatcgccctcgccgtcaccaaccttcccaaagccgttctctcctcactgatatccagaatctctgccaccaatctcttttccagaaaatgtttctccgaagtcacaaacaccataccttccggcacctcaatctccggcttcggcgtctgacacacctgatcccggttctcgccgtcaataccgacagaagttaacgcaaacttccgtgcttctcccttcacccttcgcaaaatataattcaagcactccgtctttccggtattcttttccagaccgacaattgccagactacggtatttcaatatatcagcaacctcaaacattctcccaaacatttgccgacatgccagcccgcaatcagcaggctggcttatcggcatatcatttatttcttcaaattacgtttcttgcgatccaagtcagctggctccaaagacaaacggtctccattcaacaattcggctacgccctctgtcttacgccgtttttcacactcttcacagtgacattcatccttataatctgtcggctcggtataggttgtcacaactccctcaaaattacgcaacaccaccctgttcggtccttgtgaaatcatataagtcggcatcacgggaatcttaccgccaccgcccggagcatccaccacaaaagtaggcactgcatatccggaagtatgcccacgcagactctccataatctcaatacctttagacaccggtgtacggaaatgaccgatacccatagacaagtcgcagacataaatataatacggacgtacacggatcttcaccaaaccgtgaaccaacttcatcatcacatgtgtgcaatcgtttacaccacgtaacaaaacagactgattacccaacgggataccagcatctgccaaacgagcacaagcagcagccgactcctctgtaatttcattcggatggttaaaatgagtattcaaccaaatcggatgatactttttcaacatattcaccaactcaggagtaatacgctgcggacacaccaccggagtacgggaaccgatacggataatctccacatgagggatagctctcaaacgtttgataatatactccagacgttcatcgctcaccaacaaagcatctccaccggacaataacacatcacgcacctgtggagtcttctcaatatattcgatacacttgtcaatctgttctttcggagttgcacagtcacgatggccggcaaagcgacggcgggtacagtgacggcaatacatcgaacacatgtcggtaatcaaaaacaacacccggtccggataacggtgcgtcaatcccggaactggagaatcactatcctcgtgcagagggtcttccaagtctgccggagaacggtgcaactcttcgatagtcggtactgactgacggcgaatcggacaataaggatcatccggattaatcagactcaaataatacggagtgatagccatacgcaaagttttcagagactcgcgcacaccttctgcctcttcatcggtcagtttaatatatttctgtaattcttctaacgtctcgatacgattctgcacttgccagtgccaatcgttccattgttcatctgttacttcggggaaaaattccttccttctgcttgccataactttaaatttactaatgtagaagcggctgtctgttacgacagcccctccatcacattaattaagcgtacaaatcagtaaatatttttctcaattcttcattctcacgcaattcctgcagagtaatttctgcatgtcctttagtataaccgtttcctacgatcatagtcacatcactaccgacaccttctgcgcccaatgcagctttagtaaagctggttgccatagagaagaaataaacgataccggtattcttagtacaaaggatactggtcatttcagtatcggtaatatttacgttattgatagtgatatcacacatttcgccgttagtcagctcagcaatcttctccataacaggcactggctgagtagcgtcagcagagaacacatagtcacagaaacctaacttctgcatacgctcggtacttctttggctatggcacaaaccgattaccttaccggtaacacctgcgcgttttttagcctcatagcaacacaacatacctgatttaccgccggcaccgataatcaatacagtatcgcccggtttcaccaattttgcagtctgtgcaggagcaccagctacgtccaatgcagacaaagccaatttttcaggcaggtctgaaggaatcttggcataaataccgctttcaaacaaaatagctttaccatcgatatccacctgatctacatccggacggatttctttaattttgtcaatacgcaacggcgtcaaagacaaagaaaccagagtagcgatcttatcacccactttcaaatcagtcttgcctaccagagcatcaccgattttctcaacagtacccaacaacataccgcctgaaccggtcaccggatttctgtgtttaccctgtttttcaacgatacccatcatgatttcagcaatcttagctttatcgccacctgcctgttcttcaatctgagtgaagctggctgagtcaatattcaaagtctgaacatcaatcaaaatttcattgtcatagatttcatccatattgttatccaacttatcagctggctgtggcaatacacctaccggagaaattactctatgtgttccgtatttatttccttttttcatcgttctgtaaattaaagattaatatgctattattttttcaaattcaaaatttctcttgcctctgccgaagtagccacttcgcgtcccagctctttagccaggcgcaccactttagccaccagctctccattggattttgccaacacacctctttccaggtaaagattatcttcaaatcctactctcacattaccacccatcacaatggctgctgcagccaatgaaaaggcatgacgtccgataccggtagcagtccaggtagaatctgccggaattgcatttaccagccagctcagattctgaacggttgccggagtacatccgggaacacccaatacaaaattaaactgcatcggagcacctggaacctgacctttcttagccatattcaaaaccgtatccaaatgtcccatttcaaaacactcatactccggcttgatattattttccaacatcctcttaccgaaagcacgcatcataggcattgtattctcaaatacatcatcgccgaagttacaagtaccgcaatcaagggttgccatctccgggaacaattcagttggctgcagacgttcttccgcagtcatacccacagcgccaccggtagaagggatgataatcacatccgggcacactttataaatggcatcgatacactctttaaaacgagccttgctctgagtaggcgtaccgtcatcctcacgcacatgcaaatgcacgatagcagcaccggcatctacagccgatttagcctctctgacaatttcctcaacagtataaggcactgcaggattctgttcctttgtcacctctgcgccacaaatggcagctgtaataatcaacttctccatatcctgcaattattttctttgatcctctttcttaacaacacaagttccgcttgcacggcacaccactataggctcagccaatacatctgcagcagaagcagagatatccggacgggcagccaccactttacgagcctcaaataccatcttacgggaagtgttgcccaccttcacaatttcaccgactgcctcgatataatcgccggcatacaccggagccagaaactcgacattatcgtatgccacaaacagcccttcgtcaccgtcgtgcataatcaacagctcagttgccacatctccgaacaaatgcaccatgtgtgcaccatccaccagatttccgccataatgagcatcttttgcactcattcttaatcttatcattgacttttccattattagctaaatttttcagttttacaatcaagctttcacaatataatccacgaaaatacccggagttctcaccaactcaggataaagctcacctttttccaccaattcctgcacttcagcgatcaccagatcggcagcagttgccatcagcggattgaaattctgtgttgttcctttatacaccaagtttccggcatcatcacctacacttgcgcccaccaatgcaacatcagcacgcaatggtttttccaacagataatccttaccgtcaatattcagaatctgttttccttcagcaaccaatgttcctatacctgtcggggtcaaaacaccgcccagacctgcaccgcctgcacgcacacgttctgccaaagttccttgcggacaaaattcaatttccagttccccgctattcatctgttcactggtacaaggatttgttccgatatgcgacacaatcacctttttcacttgtttattggcaatcaactgcccgcatcctttgtccgggaaagcggtatcgtttacgatcaaggtcaaattcttaactcctgattttgccaaagcgtcaacgattgcgttaggtgtaccgttagcaaggaatccgccaatcataaccgtcatcccatcagtaacctttgcaactgcctcttctactgaaataagcttcttcataagtatatggttttgtttaaaattaaacatattcaattctgtttgtcaaatttataaacaaataaccccacttgcaagtctttatagagaaaaaattctctatatattcaatatagaatcagtctaattaattttcactttagcacataaaaaatgcggaatccctttcgtttgggaattccgcatctccatacatagtatataaagaatcgattataatgctgttattaactgctttttcaaactctcaatcattggatctgctggatatttcacactccactcctccatccattcaagagcttcctcaataactgaacgctccttactagccgccaaataaggcaaaaaaagtgctaaatagtacccttcctccccttctttcaaaacaccttccttcaatatttttttcatgtgcaacaacaatcctttaaaatcttgctttcccacatattcagccgtcgataattgtgcttgccaactcgacaccttctcataatccatcttttgtaaatcctccatcaattgctgacgtccttcttcatcaaacaaatttccctgctctgctttccaacgggtatattttgcaattctgttttgtataacaacactgattcttaaatccaccatccgtttttccgcaatacgataatactctttatataatcctagaaaacgcataaaacaataatttgaaggcactgtttgtgcatcaatatgcctttctatacaactccagcacaaaggagtcagcaattcctcatcattcaatccccgaaaccaacattccataacacggtctctttgcacacgcattccggcgtcagcaagagcattcaagtaatcccgcataaattccggttttctttctcctttcgcaaaccgtttggtcaatacacctaaactattgagtccttctaaagctttcttgccaccttcaatcagccatgcagcatctccggcacccacaagccgatgattcacctcctctgtttccggatctataaacaataaagtcgggaatgcctgtatctgaaactttctggctaattcctttccttctttttccatatctatttttacacaaacaaaattccggttgaaaaacatcgctacagaatcttgtgtaaaaacagttttctccaaaatcttacaaggcccacaccaggcagtatagcaatccaaaaacacctgtttccgttcattcacggcacgtttcaagacattttcccaaccgtcttgttgaaagacaatagaaaagttttgcccgaaacaattcgggcaaaaccatccaactaacaaaaataatgtataaaaaaatctcattacaaagagtccatcaattgattattatgattctttccatcccgataccactcctgccacttcaccattatatctacgggataaccacacactcctttataaatcatatccctgcctttactgtctttcttcacggcataagtctcagcatccaatacaattacatctcccttcaattcttctcctttccccgcgtgatcttctccatatcgggaaactcctaaaataatactcttctccgaacgcgacatttcaaagcaagtgatttcagcctctccataccctaagtcatccaacgaaaacaccggtttcagagcggtaccgttttcccactcccggatattgccggccaatagctgtttcccggaagacaccatcatatattcgattgatttatattgataaaaatcgcttcttccgttcattgcttcaataggcatatccattgcagccaaaaccttacactccgtatcatcattcacattttccggcagctgcaattccagagccttcacttcatcgcctttagccaagatagccacacatacattaggtagattcgtatgcgaaccaaaaatcagacgatacccctcataagcaggtatcttcgtttccggaatctctaccattgaactacccaaattagataccaaaaggaaacgtccctcggtttcgtcaaacaccactccataatcagaataattataggccaaagtcgttataaaaaagtctcctgctgcagccactgcacttaccgggaaatacatcggagacaatttccctccatacaagctcttaatattcaacaaacccgaacgcaccaaataatactgaccactcttggtaattgtaaaagaatacaacattccatccgaaatcagcacatttttgttacctcttccctgagggctgccaaaaataaaagcccaatcatgaattccctgccaaatatactcaggagaaaaatccggtactgatggctcaggataaagaatctgacgtttccagaaattctcatccaaataggtattacctcctatgtcttccaacgtggtatctgcaagcgattttaccccttcgtcgacaccaaccatcaaaccggaatatgcctctaccggcaaataattccgatatagcctttgtcctttccctcccagctccaaaccggtagaacgctcataaaaattaacgacaaaaggcaatgtatccggaaccaatcctttataggagagttctgccttccctccaaaattactcaacaccagaatcatatctccggcccgttcgccggacacaatcaggcggaaaggaaaaatatactgatttccctgttctttatccgtaataatcagccggcagttcttatctccatacgacaaagtaaccggatagaccaatgacaactccgtactcacaaccttcttctctatctcccacgcgtaactgtaagcttccggatcgctatagaaagtaccggcaaatgtcggagtacatctcaacgtatcaaactgacggatataaatgacagaatccagaccatctgtcactccttctattttattgatttcatgataatcataattacctttatcatcgtaacaggatatccatagaatagacgacaggcataacaataaaaatatctttttcataacattcattttatcaatacacattttattcgaccggcaccatctcacgcatcagtacatactgattggtttccttgtctatcggtttattcgcattcagccaagcctccaaagccggagcatatttctgttgaatcataaaaatatttatcggcatggaattatcctctatttcaaattctgaagcaaaagatatcagcacctgccatttaatcggatgataataatacaatgaactctccatctgcttccaccataccggctctgccaggtaattgtttgccaccagtttcaactcactgctttccacatttcccactccaaaatcttcagactcctctaatttcagaataagccgtttagataattttttcacatggctggcatccaaataatcacggtgcaacacaacctctaccgtatcagtccaacacccggcacgcatcacctgtttctcagcaatcacttcataatcctttccggcttctagtgttgtctttcctttcttcacaactccagtatcagccaccaccactctatacgtcctgtctctatcagacaacctgcctgtatagcataccaccaacctcaccgtatcaaccgtcacttcaggcatcttctttccgaaagaatagacaatcgaatcaaaatctactttatctccagcctgattgtatataaaattctgaaaatacacacaatcacgctccccataaaatgagtccaaaccatcagaacatcctatattgagcaaaaaacaaaaacttgcccatgctattatccatttcttaatcatatccgaatcattaaattatctattaccatattcttcctccacctccggtataggtagcacaaacacctcattgctcgctttgatatttcccggagcagcttgtctcaagatatcgtgatggagacgtttataagcaaaaaacatctgaccttcacacaaatactccctcctcatctcagaaagcaaaacttcactatccaaactggtcagtttatattcaccaccaacatccataaaccgacttttcctcatcgtttccaccaaactctttgctttttcagcatcctcatccaaccatccctcagcagcaatcaaatacatttccgataacttcatcataggcactttcggaacaatcgcctcagcattggcttcgctcaaataatactttctcaacatgactccggcttcagccacccatctgttcaagcggatatcattggcagatcccgcatatacctcgctcttcaaatccagactcatttgcagattacccgtattaccgggtcctgggtccacccgatggtgtacttctgaatattctctgatttttttattccgcaaagaaaaaatatgttcatccgaaaacaaaatatcccatttggtatcagtctccgttccaaaagctttccgatactccatcaaagcaaatctttcactattgatcacctcttcagccaacgtacgagccaattctttgtctcccggagcatttctggtaatgtagatacgtgccaacaaacctttcacggcataatagttaatacgtgccacatattggtccgactcgtttttatctgccagcatataaggcttcacctttataatcggatcattttccaaacattttaaagcttccgtacaatcctcgatacaggctttcaaaaactgctcactggttgaaagctctgtcgtctccactccgaattcacgattataaggcaatttctttatctgggcatcctgtccgtaagaaggagcaaacagtctccacaaatcaaaatgcatccaagccctcaaagccaaagcctcacctttaatttgctttctcaccttatcggtcatcacatctccactattcgcctcatacttcaacagattattaatcatagcaatcgtataataaccgcttgaccacagactttcgatatatcctttggcatcctccatggcataattgtaattgaccaaagaattataatcagccagcatattgctgtaatcataagtttgtgcgagaacatccacgacaccaaaagtcatctcggcaccatacaattcacttttcgacattttactgtatataccggctaaagcctcgtgaaatccctgttccgtactgaacagtttttcctcttccacttcattgattaaatctacatccagccaattcgaacaagaagacaatagaagaagcaatccaactagaaatcctgtatttttaagtttcatatctgtcatattattaatttacccattaaaatgctacgtttaagcctattgagaaagtcctggcaaaaggataggcagtacctctctcctgttcaatcgatgaaatacggaaaacatctgtcatactagctaaaaacttaattctttcagcaccgatacaagaagcatatttcaacggcaactcgtacgacagagataccgattgcaaactgaaaaggttgtctttctgcatcaaacgagttgtctgataagcattggtctgctcatcgattctacggaacagtgcttcatcaccgggattcatccaacggtcatacaaagctcgtttatccttattacgcacacgctcataatgctgccagttattctccaccttatcagcaagcgtagaattataagtcttgccaccccattgatagcggaacaataaatatagattaaaacctttccaatttaaattactcgtaatattaccctccatttttggtaacatatcacccacattcaccttatcccgataatcatatacaaatgtacgcgagccatctgccttgataaatacctcatttccggttgccgggtcaatacctgctgaacgcaccaacatcaaagccgactgcgaacgtccttctgcatattgtctatatactgtcccccccttcaaagctgcctccttatttgcatcctcattcatcttctccaacatattggacaatttcttgattttattccggttcgcaaaacctgccaatgtcacattccaggtcaactcttttgcccgattttcaataatacccacacgcaaacgcccctcaataccacggttttctgattttcccaaattctccgtataactatagaaaccggtagaaggcgcaatatctatcgggagcaacagattatcggtaatcttcaaataagcatccacattcaactgaaccctgcctttcaaaaatgcccagtcaataccggcattataagaataagtattctgccacttcaatcccggatttccataccctttcaacatcacgccataatatccgttatactcattgtcaaaatcatattggtaagtggtcaaggcctgtgaagattcaaaattcacactaccggtactaccggcagacagtcttacttttaaaagattccgttcattccaattcacaaaatgctccttatgcacattccatgcaaaaccgacagcccagaatggagcaaaacgagaatcccgtccgaatttactagagccatccgttcgataagaaaaatcaaagaaataacgattgtcccaaccatagtttacattcgcaaaaaaacccaccaatctagacttatcataagaacccgatggcttggaattatacttgaatgcagttcctgctccgataaaatccatcgtttcgctcacgaatcctgtcgcagtataccaatctcctttcgtcatggtagccatcatattggttccgacaccgatattcaatacacttttaccgatatttttaaaataagacaaagtcacattaccatcgaaccggtcagtcttgccatttttaacataataactacccttattcttttctgcatcttccacctccgaagctatataattgaattcaggtgatttaggagacttaaactcttcagccttatccaattgcttggtataactaaaacgtccctgcaggcgcatactgggaatgatacgccaatcaatattaaaattatcctgcactgacgtatattctgtcacactgaaattaggcaatgttgcattaatcatcgggttgtaatcaccagaagacaatttttccaccaacttaccctcttcatcataaatacggtcatatggattttgtgaagcccaagtagaaaaacttccataaggggaattgtctcccttgatattatccaccagcacatcattcctaataaagaaattctccccaacattatattggaaagtcacactcagaccgtagttcttacgtccggattccttcatcacccccttgtcgcctaaatagcgtaaatcaattccatatctgaaatgctcatcgcctccttcaaagttcacagaataacgttgattcaatgccgtttgcaatggttgggacaaccaataagtatctactcctgacaacatcgcctccacacgtttgttatacacctgatcagccaccaactgatcctcccatgaatcctgctcataagcaccgctcaatttctcataacgcaatttttcttcggcattcatcagattataatctctcaaatccggaatcgatattgtaaaattcgcatttccggtaattctgattctacctgcacgcggacgcactgttgtaattaaaatcacaccattggctcctcgtgaaccatataatgcagtcgctgttgcatctttcaatatcgtcaattccgctacacggttcatatccaagtcatacactctttgtgctgtcacctccactccatccaacacatacaaaggagcattgggattcgtctgtgaatcatcagcactggaacgtaagtcaaacccattttcacctcgaatagtaatttccggtactcggttaggatcagaaccattaatcaaatcttctgtcaaccgaatagaaggatcaaacgcattcaaagcctgaaggatattttgtgttcctacctttttcaactcatccaccttcacagttacctccgaaccggtaaaactctcctttgtcttttgaaaataacccgcattcaccacaacttcatccatctccgttgcatcctcttccagcaccacctgcaaaggtttatcactatcaacagccacttcttttgttttcatacccacaaatgaaaacaaaagagtcaccttatccaaattagctactgccaaagaaaatttaccttgcgcatcagttgcagttcccaccgtactaccctttatcaacaccgtcacccccggcaatggaactcctgccttatctttaacgacaccaacaattttcttttcctctaccgtctgttgttttcttatcaccaccacattatcctccaccacataggaaaatccggtatttttcaagcaaaggtctaatatttcatctaaggcagcatttttaaattctgctttagagaccttaatgttacgcacatcgtccatattatatacaaacgtataattactttgattgcgtattgccgacaggacatctgtcaacaaagcgtcagacaacgacaacgacaaactgacactttgcgaatagctcattgccgaaagttgtaaactcagcaaaaagaataaaaacaagaacttcgttttcaaactacatttttttctcatgattttataaatgggttacacataattattcaagtcattgcttcatcaccttcaacgtgcgtccttcaatagcaaatttcacctttttagtataggcaatcttgcgcaatacatcatcaatatcatgataacgcttcaattccaatgaaaaacgcatacttttcagactttcgtgtacaaatttgatatctaaatcataccagcgtgacaactgcttcaaaatcgtttccagatcaacatctgaaaaccaaaaaattccctctttccacaacacataattacggacctctaccttacgcacagcaaatctctgcttctcatccgaccaacatgcttgttgattcggttgtaacatcacctgtttaccttctttagcaacaacaacctttccttcaaccaacgttgttgtcaaaacattttcatatgccgacacattaaaactggtacccaatactttcacttcagcatctgccaccttcacaacaaaaggttttccggcacttttacaaacttcaaaataaccctcacccatcaactccacctgccgcaatgaatcagcaaaaacaaccggataacgcaatttcgatccggcattcagccacacttggctaccatctgacaacacaatcgaatattctcctcccactggcaccaccaacgtattataaaccggaatatctttctttacagaatccgccttatattgcaactgctctcccgacatcaaaattcggacaccgttctgctcctgcagactaccatcagttgcattctccaaattaaccgtcttcccatcagccataatcaacaacgccttattcattcccggcacaatcacctcctcagccacaggaattacaggaacaatttctttattcaattgattatataaataaaaggtaatacaaataggcaacaccaatatcgctgccacccatccataacgtttccatccaactctccgataacccactcttttttcaaaatttctccaacgcctctccaaatcaggacaaaccacttttccatcttccatagccctcttacagaatttctccattttattgcggttatccggttcttcatccaaccatctatcaatcaactgcttctcttcttctgtagcagtaccagccatccaatgggcaatacatttagccaaatccaatcgtttacgtaaatttatatctccaaattcatccatgtctttaccattatattatcatactaaagacaattgaaaatgggaagcgggtgtgtcaataaataaaaaaattaaaaaggtaagtcacaaaacaaatataaaaggaacaaaccatcccgatccaaatatttacgcaacacgttataggcactttttttcatacttttcaccgtattgactgaaatacccaatatttcggctacctcattattattctttccctgcaaattcaatagaataatctttcttgtctgtggggctaacttatcgatggcagcatacagcaaacggattgtttctattgcagtcacctcatccaaccacgacaattcacactcttcttctccctctaccgccaacacctgttctttgattttctcgtgcttatagtaattaaaataaagatttcgtgccaccgtatataaaaaagcttttgcattctctatcgaatcaaactcctccttacactcataaactttgataaatgcctcttgtgccaaatcatcagcaatatcataatcttccgtatatttacacatcaaagcataaacggaaggaaaaaattcatgatagaattttctaaattcactatgtgactttaacttgattggcattatgacaggcaaatatatcaactttacctaaaatattcaacaaaaaatgggttgccggaaagacaacccattttacacaaactaactttatctcaatcaaacaaataagcaagtctcaatttcaatagacgataatgctcgcgctgcttgtcgttaccgctgttagagcgactcttggccaattgatacacctttctcagataagtcatgataaccggcaacttattcgccttatctatccggggagtcaacacaatctctcccaacggctctgaaccttccatatccaattgttgattgcaacaagcatgacaactgcaaaccgatgccgctgtccactttgaaaatgcacttttccctgctgtccctccaaactccttcttttccaggaagcttgtcaatcctgtcacgaaagtattctgataagccatatccgtcattgtcagacgtccgctcttttttacgaacatttctgtataaatcattttcagataatcgttcaatgtaaacacattcttgccatccacttcattcaattgcatacgtcccaacacctctctggtcaacagttcctcaaaaaaggcagtcaaatccacataaggcttgactgtcggtcctattacagcagtcactttatcattaatcaaccacgtctgcccttcattcagattatccaaaacaaatttaaaagcctccacctgcttttccttaggcacatattcatacaattttactgaatcaccgtaatatttaggattaatatacataccacccacactcaccatagcatgagaaatataccgcataaactgggcaaccacatccttgtacacactctccaccgattccataccattgtcgtccacattgatccaatccacaaaattctcagccacatacttcaaattcttcatgccataagaattagccttcaccacatcatctcccaaatcctctgcctgagagcgcgggtcgaaattaaactcaagcaactgtttgccataaaaatacattttatcgcctattttttccttcacccatcctctcaatgtcgctttctcatcctccggcttttgtacattcggcaatacctgataaccatatttaatggcaaacttatcatatacaccaatcaacggaggagtcaactttacacccctttccatatctcccggctgagccacataattgaaacgcgcataatccataatagaaggggtagtcccatacttctgtgtaaattcaggatcacgcaacatctcaaccgggaatgctgcagatgcaccgaaattatgcatcaatcccaaagtatgtccgatttcatgtgctgccacataacgcatcgcttcacccatattctcatccgtcataaccggacaacgcactgtagaatccactgcaccggtctgaatcattctccacttattcaacagagtcaccacaccataccaagaaatcacgtcaccgcacagtatctctcccgagcgaggatccacccaagacggacccatagaattttccttggaggaagtgacaaaacgataacagttataatgaatgtcatccgggtcaaaattcgggtcattcttaggatactctttcaccacaatcgcattcttgaaaccgatttcctcaaaagcgatattccagtctgcaatacccaattttacatactttctccatttggcaggtatcgttgtatccacataccacacaatcggttttacaggttccaccaactctcccgccagatatttctccatatctttgggttgcagattccaacggttgataataccatatttttgcaaacgatcgtaattctcgtcaaacacatgccgtatctcctcaaaaaaacccactctttcatcagaataacgcggagtcatcggcttttcaggcagcaaaacaatattgcgagcctcaatggtagtcagaggtccctccttttcagtagtataagtcatcatgcttttcacgatgatattatcctcaaaagccttacactcgtctatcttcgaacggtcactctgaaaagacccaccgaaaggcaccaccatcctcacttctgccggcaggtcaggaaacggagagaactctgcaattgaagacagaaacaacgaagtggcatcaatcacacaagccgtagaatcctcggtctgtgcttcgatcttaaaagctttccagataggcggattactatggcgtttataggcatcatacatctccgatccttccttgcattcatacatcaagtgcgggaagtgcatatagactttgctttcgtcacaagaaaaagtaatcaacagcggggtgcggttaatcgtaccggggtcaatctgccacgtacgactggttgttgatacgcgcgaagcaatcaggaaatcacgactcataatcgctttcggtatttccagatagaccttatccttcttcttgattacattaaacatacccttcttcacctcggcatccttcaccaatttgtcataatcggtttctttttttgcgctagccgttgaatcacttgcagcagtctgctctgtttttttctttttcttcttgccaaaaatcttatcagctgcagaggcatccacaaaaactaaaataccgcacaataataatgctacacttaaaaattttctcataaatcctatcgtttaattgagtttatattcaaattaattggcttcatatcctatattcctataatcaatgcctatctcattcaaagctgtaaccaatacatcgtatgcctttttgaacttctcatgtttgcaggctttagcaatagtttcctctgagctgctatacaaaaattctatatagtcttccaaatatccagctcttgaagctgcaaactgataacctactttcaccattccccaagaaccatccggcttctgtccgtacttttcataaacttgtccactggcataccccaactcccaaaaattatcttccgtccattcttcactggtttcatagctaaaattcttataatattcatcatccgttgaataaaggtaaaaatcttcatccaccttccaccctttatattttgccatatattctgccaaaaatttataattccattcccgggataaagcaattttatccgcttcactcttattcagcatttcatcattcaccaaaaatgagatatggaattctgtcagataaatattacggtaatcattactgttcccagtatagcgtaccgtatcggcaagcaaaattttataaggaaagtaatccttgataatcttttcactgtaaccgttcaaaaacatcttcttgaaaaaatccaaagcagcagccaaatgttcctgactttgctcaggagctgtcaaagataacagatgcttcgtctggaaattaaacagataatccgccgaatccggatctgtaatcaataattttccataatcataataataccaagaaacaaatttaaacaccgggtctgtggatgtcgtatcataagcgcgtctgtacgaaccttcctccgcataaatggcatcctcattacaacaacctgacaacagcatgccggcaaacaaggcgaataataaaatatattttcccataatcgtcaatatctatttatttaacaattgtttccaccctttccggacgttttatatccggattgattcgctgaacatccaatggtagtggcagaacataattgggactttccgcttccaggacaaaagttcggatactttggctgtcgtgcaaatccggataggcatgctccaaagccaccccccagcgccggatatcaaaccagcgtatatcctcaaagcaaaattcaatccgcttctctctcctcaaaatatcagttgcttcctctataccttgagcttccaaagttgcatttcccgtcggagcaattcgctctttgtaaaccttcatcaaatcaaccaaagccaaatccttctgattggtattcaaataagcctccgcacgattgaagtacacctcttcaatacggtagttcataccgaaacaactggaataattggcatcaaacttatgaacttctgtcccatcataattccagaaagtgtaggattgtccccgaatatcatccggattctgctttgccaatgccattaaatccggagccacacaatatctccctatactataaccggaaactgtaaatccaggaagagcgttacgctcccaccaagtaaacaacagattacctccatcacgtgaaagaatcggatattcccaaacccaatcatcactgtttttctttagacgctcataattcatcacagctttggaggtctctttcaacagatcattacaaacggtaatcacatcatcatagcgtttttgctccagataaatgcgggacaggaaaagacgcacaacatctgcattgggacggaaaattgtatttttctgttccccctttgccagattatccagtgcatgcaataaatccgtttcaatcaattcataaatggttgccagattcgcccggctataaaaatggtctttgatggtcgtttcttgattcaccggcacccccatagcagtctgagcctgctcatcgctacgccaaggttcgccatacatattcactagataccaatatgccattgccctgacagcctgcacctctcccaataaacggtatttcactccctccacatcctcttcaaatgcatttacattttcctcgatcatattacttgtcagaattttgttatacaaaaattcccaggcaggatcaatcatctcgtcaccattcggtttaatctgaggttcttttgcccagttataccagttcagatactcctcccgggcatcactttctgaacctcttacgacacatcccatatcatccgacatcatcaagatattaaaacaggtattatctgccgacttggcaatcagttctccaaacactaattcgctatattcatccaacgtagatggaatcaccttatccttatctttgtaatccaagaagttactacaagagctaagtacaaacaacagcggtacaatatatctttttactttcataatcgtgcttatttagaaagttatatttaacattaaagagtaagactgttggggaggtatcgttcccgaacccaaagtcacctgctcaggatctcgtccttttaaatcctttgatttgattacaaacggattggaaacacctaaactgagagaagctcctttaagatagacttttttcaaaatatcttcgggcagcgaataagagagtgtaattgccgtacaacgcataaaattaccggaaaccacacgcaaatcactgtcattatacatctgccaataattatctgccaccatataattggcattcataatcgtccctttattgtccggattcatcgagttcatagttaacaactgatcgctcagacgcggaatattcgtatatttttcatcaccgggtttctgccaacgattcacaaattcgctgctcatattctgagcaggatagggcaacttcaagttatcctcatcatacaggtcattcaaacggattttatttcccaaagacaaagaaaaacgggtattcaaagaaagacgtttataccggaacgacatagaaagaccgcctgtaaaatcagcttcgcgtctgccactatatttcaatacagatgccaacgcttcttccttactcgaaatgatgacattgccgtcacggtcataatccttggtccctttaaaagtcggcagaccctctgcattcaaacctgcaaactgatatgagtagaaagaattcaaggagtaaccgttcttaataatcgttccgttcaaatagtcgttgtaagtcactgtccgctctgctgcattggcaatgctattccggttcttacttgtattaaatcccagattccattcaaaattctctgtccgcaccggagtcagtgaaaaggctaaatcccatcccttatttgtcaaatcaccgccattgattgtaaccatttttgctccattggtcgattctatttcaaccgtcatcaactgatccttgctctttttataataatactcgaaacttccggacagcaccccgttgaaaaaatcaaaatcaatacctgcattcaatgaattggttttttcccatttcaaatccttgtttggcaactgagagacggttgctttatattcttcagaactactgtgtagcgtacccagaccaataatcaggttgggattatgcgcatccgtcacattggcctgaataccataagaagcccgaatactcaaattcgacaatacattggatagcgaatacataaaattctcatctgtgatattccaacggcctgaaaatgaccagatcggcaagaatctggctgcttcacctaacttgtttgaaccatctccacgtacattggcactgataatatattttcctcgatatccgtaagataatgtaccgtaataagacataaaattagtcgtattatcagtaatcagaggctttaaagcctgcatggcagaggatgccttttcccaatccactaagttctcgagagtcacaaacttcttcccacgtcccggcaaatacccccactcttcattatcatatcctttataacgagagctggacgcttcaaaaccggcagaaaaagaaacactgtgcacctcattaaacatcttattcatattcaatgaaaaacgagccaaaaaagaatcatttgtatcctcacctgttttcaatataccgccaaaaggaatctgactcacctgttttcgatacttggattcctgggattctgtaaaaccgcttctatcatatccataaggcaaccccctataagtgctcacataataagatttttcatcataccaagtttccgaattggtagcactggtagtataagacaataaagcattagcattcaaccaagaagtaatcttataatccaaattgacacgggcactgacatcccggatactttgctctgtccccgaataatccaattcgttcaagatgttgtaattcaataccggattatggatagaagatggatctcccaataaggaggatacttccttgtaaccatagaatgcatacgaaccatctgcattaaaagccgggattgcccgagaagtactataagcatagtcattcaagtctacagtcggacgatcggtcttgttgataccagccgaaagacttacttcagcgtgtaaacgctttgacaaattaaagcccaaattcgacataaaactaaaacgctctccctcctcttgcaactgcgctccctgttgattggaatagcctgctgaaaaatagtaagtcacacgctttgagcctccggataccgacagcgtgtaagattggctaaacgagttacggaacaaaagatcataccaatctgtatttagctctttcatcgctttcacctctttattaaattgatccatagttattctaccattccacaaacggttcaacgctccttcataccccacatcatcgggagaaaagccggtaaattgtagcccccggttatgaatttcttccgacacctctattctttccttagagttcatacgctcctgatttttatagcttggacgctgcataaaactcatggaagtactgaaacgtactgccggagcaccctgttttccacgtttggtcgtaatcacaatcacgccattcgcagcttttgaaccataaagggctgtagccgaagcatccttcaatacatcaatacggtcaatatcttccggattcaaaccggaaatggcattaccaatcagattcaccttgtccatactgttcaactcagttgcatccagcggtaccggatctgacaacacaacaccatctaccacccaaactggctctcgattaccaataatggtcgatgacccgcggatacggattttcggagctgcccctaccgtagaggtcatctgcatcaccgacatgcccggcacctttccctgcaacatctgatccaaagaagttcccaccggctctattacatcttctgcattcaaagaaacaatagaagaagttgactctcttttcttcaatacctgataacctgttaccaccacttcatccatttgagtggactgttctttcatcaccaccttcagcgcctcttcagattcaacaaaaacagtctgcggagccattccgacaaaagagaaaagcaaagcgctgttctttggcacccgcaaattaaaatgtccggtagcattcgttaaagtaccggtcgaactgcccgtaatatacaccgctactccgggtaatggttctccaaccgcatccgtcactaatccctgagccagaatattctcgtctttttgaaccttcttgatagtgataacgtttccgtccaccttgtaagacaaatccgtatccttcaatgcggcatccaacacctcgccggctgacacttttttcatatcgagtgtcaccttcttggtacaggcatcaattacagctgtagaatacaccagacgataactgtgttttttcaacacttccaacacctctttcaccgaggcatccttcacattgattgtcaccttacgtgcttcggtctgtgcagacaagggcaaagacaaacacaagacaaaaagacataacaaaccttgaagtggaatttttttaacaaaactcctccacgagtcaagcttttctttcatacatttgtagatttagatttaacaacatgccctcacgggctttattttgagcggatgctgccaacatccgcttactttttacttacactgacagttcggtcatggatttcaaaacgcacaccgcttacctccgacatcaattccaatatcttgtccacctctccgtatttatcaatgctgatataaaatttttcgtttttcaccggttggttccgatattccacctgaaaaccataccaatctgacaaacgctccatgatttcttccaagcgcacatccttgaaaaggaatatgttgtctttccaacaaaccacctcttcgacatccacctctttcaccgaaatatccttaccgtccttaccgacaagagcctgttggttcggcaccaacaccgttttcgccacaccgctgctgacctgcacacttccctccaccaaagtggcttccattttattatcttccagtgatttcacattaaactgtgttcccaacacctgtacatcgccccccgtcgtatgcactacaaacggatgctccttgtccttcgccacttctaagtaagcctctccacgctcaagatacacttcacgcaaagcaccggcaaagttcaccggaaatttcagttccgtatcctcattcagccacactttcgtcccgtccgccaatacaagttggaactctccccctttcggcacgacaatggtattatattccaccttaggttcagactctgactcgtgccggttcttttcatacaccagctcgttccctttgttcaccgcattcggcaccacctgtccctgctcttcttttctgttcagatacacctcctcgccgctcgccaatatcaccttcggttcttttcgttccactaccggaatttttgactccatctgcacggattcactcacctgtacagccacatctttctccgttcccaacaatagataagctgccactgccaacggtaacagcaaaacggcagcataacgccacataccgattacccgaccgccttttctgcctctgcgtacctgcataatctcctcatgcaatccccagctgacaatctcctccttcatcctctgatatgcctcagcccctatccctcgctcccggcactgctcttccaattgcttccgttcctcttccgacaagcaatcaaaaatatccttggctatcaatttatgtaattttctcatgttctaatgctcttttctaacgattatacacatgagaaagaaaaacgggtaaacagcaatgaatgatttaactttgtttaacaataaagggaatattattctcaaaacaagtcacaactgcataaagcggtacatttatcaaccaatcttgctcccgataatctgacatagaaaaacgcaaacctctcatttccgggtgagaagctacaaatgtcgaaagagatttcgcccgaagattttcttctgctttcacctctattggaactatttcgccattatgctgaatcaaaaaatcaatttccaacttcgccttattactatagtaaaaaacagaagtattgcgagtagcaaccaattgattcataacataattttctgtaaaagctcctttagattcctccattccattttctgccaccaataatttctccggaggagtttcactcatagctcccaataaaccacaatccaaaagaaaaagtttaaaacaggatatatccacataaaatttcaaaggcattttcgcttcatttactttttcaactttataaaccaaacccgcatccatcaaccactggatggccacttcaaaatctttcgccctcgctccaggctttgcaactccataaatgaattttttattttccttaactaattgtgaaggcattgactgccataccatattgatacgatttgattccgaaacaggcacatgcttggatatatctttctgataagtataaagaatgttgttttgaacttctcttactttaataacatcattagtctctataaacatttttacagcttcaggcataccgccgacaaaataatattcacgcaatattctgatatattcgtctcttaaaattttcatcatcccccaatctccggaacgaagaatatcaaccaattgttttctgcctcgcgctaacaaaaattcatcaaatgtcataggataaatatgcaacacatcaaccttacctaccggaaatgattcgcccccatgcattgtaatccccagcaatgaaccggcaactgccacatgatactgaggagcattttcacaaaaatatttcaaaactgacaaaccgcgtggagcttcttgaatttcatctataataatcagcgttttatcggcctctatactttgttccgtaatagcacctatcgcaagaatgatacgctgtatattataatcttgggagaacagattctttgccaattcgtttccctcacaattgacataagcaacattcgtaaactcttgttttccaaacatttttagtatataagttttaccaacctgacgtgcacctgacaaaataagaggtttccgcccttctttattcttccatattttgagttgttctataatatttcgatacatacaacattctgatttatttaacaatacacgcaaatatacatttttcctaccgaactttcaacataaaaacacatttttcctaccgaactttcaatagaaaaacacatttttcctaccgaacttttatcaaaggtgcattttcctataaatcacaatctgtagaattgttccgcattttgtggaataattccacaagtcacgtcaggataagcaaggactataaaaaaaacatcattccgtatttcaagcacttacaaaaaaaataagccgcaaacaaataaatggtccgttttttaataacaggataatgtaaattttttatgtatgaaacagattattaaaatgaaatttattattctttctctattgggaatgatatcactgcaagcagtggcacaacaaagaacgattagcggaacaatcgtctcctcggaaggaaacgaaccgctgattggagcgaccatcaccgtaaaaggggcggaaactcgaggtaccgttaccgatgtgaacggcaaatataccctgcaaatagaaacaaaagataaaatattggtagtcgcctatctgggaatgaaaacccaacatctgaaagtccccgccaccaacaaactggatatcgtgttggaaccggaaaatatgagattggatgatgtggttgtcaccggttatggaaatttcaccaaatcctctttcaccggctccgccaacaccttaaaaggcgatttgatgaaaaacattccggtggtaagcgttgagcaaaaactccaaggtctgacaaccggagtgaatatcaccagcagctcgggacaacccggagccaatcaaaatatccgaatccgcggaatgggttcgttcaacgcatcacaggaaccactgtttgtcatcgacggaataccggtcagctccggaagcctgagcacgggaggtgcagatgcggcttatatgaacaactccaaaacaaacatcatgagcaccttgaatccttctgatattgagaatatcaccatcatcaaggatgctgccgccgcttcgttatacggttcacgtgccgccaacggtgtgattctgattaccaccaaacgcggacaagccggaagggctcgtgtcaccttcaatgtctctgccggtttttccaatgcagccgtagatttccgcccgaccttgaatggcgaccaacgttacgaattattgtatgaaggtctggtaaatgctgccattgacaagcaaatggagaatccccaggaatatgccaatgctgaaataggcaagtatgccttcaaaccaaccatgggatataccgattggcgcaacgaactgttgcgtacagctctgcagcaaaactacgaagcatccgtatccggaggcaatgccaaaagcacctattatctgtcattaggctacaacaaccaggaaggattggctaaaaattcaagcctggaccgttactctgcccgtctgaacctgactcacaaagtaggcaaaatagccgaagtgggtgcaaacatgatgttctcgcaaatgaaccaggagatgaacgaagagcgtggttctgccatcaaccccttcctggacgtagccggtctgctgaacccctccatgactgtccgcgacgagaatggcaactttatcggcaccagcgaagatgatgccatgaatccccttcgggatatcctgacagactataaccgcacccgcatgagccgtatattctctacgggatatgcctctatcgaaccgataaaggggctgaaaatcaaggaaacattgagctatgactataatattcagaaagattcccgctatctgaatccgctgagttcatccggtataaagaccagcaacggagcacagactgccaaaggttttatcgaatacggtaaattgatttcgtcaacctctatcaactatgtacacacatttgccgaaagacacaatctggatgtattggctgcctatgaaatcgaagactataaaatggataaagccatcggtgaaaaatccaaactgccttcagaccaactgacagcccccgacaatgctgccgtattgaacggtttcgtatcttcacctcaaggctaccgcatgttgtcatacgtatccagactgaattacaatttcgacagccgttattacctggccggcagtttccgccgggatggaagctcacgtctctctcccgacaaccgctggggaaatttctggtccgtctctgccatgtggcacatcagtaacgaacgcttcatgaaacctatcaaaaatatattgagcgacctcaaaatccgggcatcttatggcgtaaacggtaaccagccgggagcttactatggctatatgggactttactcctattcacaaaactacatgggacaatccggttcgttcgaatcatccatgcccaacaacaacctgggctgggagaaaaactacaacttgaatatcgggctcgaccttgctttcctcaaccggattttcctgtcggtagagtattacaaccgcgacaccaaggacctgctttacaaccgccccatcagtgccaccaccggctttaccaactatctggcgaatgtcgggcaattaaacaacaaaggtattgaagtggaattgcgtacactgaactttataagaaacaatttcaactggaccacagttatcaacctgagccataacaaaaacaaaatcatttctctaaacaacgaactggaacaaagcattgaaggcaactggaagattcacaaaatcggtttgccataccacactttctatgtaaaagaatttgccggtgtaaacccggaaaacggattggcagaatattacatgaacacaccgctggaaaatggcgaggttgaccgttctttaactacagatgccagcaaagcaaccagcatcccctataaatccgtagatccgaaagtatcgggaggtatcaccaaccttttcagctatagatggtttgacctaaacttcaccttcacctattcccttggcggctattcgttcgacaagatgggcaccatgcttgaaaacggaggagagaaaatctattcaggccgttataacctgccggcttacatgatggaccgttggcaaaaaccgggcgaccgtacagacatcccccgattcagctatgccgacaaaggcaccgtttccaacagctcccgctatatccacagcacagaccacctgcgtctgaagaatctgacattcggattcacacttccgagcgaatggaccagcaaagtcaaaatagagaatgccagaatctatttttcaggcagcaatctgctcacttgggcaaaatggaaacaatacgacccggaagtaccggtacacggagaagtatggtgtgaagctcctgccatgcgtaccttcagtttcggagctcaattaacattctaatcaccaataatagatatgacaatgaaagcaaaatatttacccatcggaattacactggcaataagctcattattcagtgcatgctccaacagctggctcgatttgaatccatcgaccgccgttccccaagaccaggccatgaacaccctggaaggcatgcaagcagccctcaacggcatttaccggcagacctcacaacacagctactacggcgataaccactggtattatggcgattgccgtgccaccgacgtccaggcccgtgtcatcaacaagtcccgcatcgtgccttactacacctacaacgtccagccgacagacaacaacaacgttgttcttccctggaaccgtccctacctggtaatccgccaggcaaacaatctgattcaggcaatcaaccaatatccaagtgaaaaaatcacaccggagatacaaaacatcaaggcagaagctcttgccctacgcagtttggccctgttcaatctaacccgtatgtatggtatgccatatatgaatgacaacggcgcttcattgggcgtacccattgaaacgaccccccaaacacccgaccaccggccggcacgcaacaccgttgctgaatgctacacccaagttatcaccgactttgaagatgccatcaaattaggtatcagcaaagaaaagaaagacggacacatcaactactggggagtgcaagctctgctctcccgtgtttatctgaacaaaggagactataaaaatgcctatgcctgcgccacagatgtcattgaaaacaatggaaacaactatcaactgtacaatcaggaaaactactctaaaatctggggacaggacttccaggcagaatccatattcgaactgttcattgacaccaacgaaccttctgaatggggcggcggaaccggcggcgagggtgctccttccgtatatgaggatatcacggacgaaagcggatggaacaatttgattctgaccgatgacttcctgactcttttaaacgaagacccccaagacgtgcgccactgcatcgccaaaaagtcggccattgagaacaacgaaaaattaccggaagctgcccgtaaccaatcggttatcctgaccaaattcccgggcaaaaacggagatgtaaaaaccaataacatctgcatcatccgtctttcagaagtgtatctgaatgcagcagaggcaggtctgaaagaaggtggggcatcagctcaacagggaatgaaatatttcaatgagctcgttgcagaacgcacatcgaatgccgcacagcaagtggagaccgcccaatttacagtggagcgcatactcaaagaacgccgcaaagagctgataggagaaggtcttatttatttcgattatctccgcacccagactcccatcgagcgtaaaggccaatggcacctcgatttaaagaattacgatgccgtcaccatcctccacacagacccgcgggttgcactgcctattccacaaaatgaaatagacgccaatcccaacatcaactccaagaaataaaatatagcgggatgttgtccatgtgacagcatcccgctaaaatttcgttccaatcaaactctattccttcaccgccctgcacctcactgttcggaaagtcaagcaaaaacatttccaaatcacggtcatactccttgatagtcagataaccgctctgataaatcatcggcagcggatattccacgtccgccttgtagctcataaactcatcctccgtataatatttcccggtcaactcgtctatcccctcatgaaaatgtctgtatgcctatcggatatttcattgctgttgtatttatttccacaaagatacgaaaaatactcacaaagaatacaatggcataccataacgaccgtccacaatatcttccaacatcttcttcagggcattcaatactttcaccttcttgcctgccagattgtttttttccgacggatcattcttcaaatcataaagttgtgcttctttactattaccggtttccacatccacatcgctattatatgaagggcccttacccggatgtatatatttccatttcccggtcagcaaagagaggttggtctgcaaattctgcactaccaatgcatcccgtcccttcttgtctttacccatccaggcatccaaccggttctggctgtcaggagcagcaccgactggcatttccacaccgattaaagcagccaaagaagccatccagtcaatctgacacaacagagcatccgatacttgcccgggtttgatatgacctttccatctccaaatacaaggtacacgggttcccgcctcatacgaactgtatttaccgccccggtaaattcctgccggtttatgttcacccaacaactctacagcttggtcttgatatccatcatccaccacaggaccattatcgctcgaaaggatgacaagcgtatttttatccaaacccaaacgttccaaagcatcaagcaaccgacccacagaccaatcaaactgcaacagacaatcaccacgaggtcccataccgcttttgccgacaaatcgggcatcaggagcccggggtacatgcacatcctgtgttgcaaaatacaggaagaaaggggtatctttatgcgcttccagaaagtccacagctttttctgtcaatgtctcagctattttttcatccttccacaaagcctttttaccacctttcatataacctattcgcgagattccgtttacgatactttgatcatgcccgtgcgacggatacattttcagcaactcaaggttatctttaccggtaggttctcccggaaaattcttctcataacttacttcaatgggatcgtccggttccagattttccacccgatcattatgtacaaacacacacggcacccgatcaccggtagccgccattacaaacgaataatcaaagccgaggtctccgatacccggcttaatcagactgttccaatcctgtgagcctcgcttgtcgcccaaacccaaatgccatttgccaatcaccccggtcttatatccggcactttgaaacaaatcacccaaagtatagcgttccggacgaataacaagtccggcatcaccgtctgcaatgcccgtaccttttcttctccaagcatattcacctgtcaacatagcatatcgggaaggcgtactgacagaagcggcagaatgagtattggtaaacaaaataccctgccgagccagacgttccacattcggcgtatgaatcgtgcggctaccattgcaactcaaatcaccgaaaccgatatcatcggcataaataaaaagcacattgggtctgtcatgctttacttcttgcgcttgcgttttccctaccatggcaagcaacgctaaagaataaaaataataaggtcttctcatatattattttacaaaagtaaaatccgccattattcaggcttgaaaaatatttttcagtttgaatatcaacgaatgtatttttcttgtaactttgtccgcattaaatctataaatttatcattcacaaaatgtgaatacaaaattaaaaacaatattatgaacaaaaaattaaccttactattatttgctgctgctttgtgtttctctgcacaagctcagacaaagacagaagaagttcgtcttccgggttatcgaaccacatttgaagccaacaaattttggcacaactggtttgtttctgcacatttcggtgccaattccttccagggagaaaattcaaaagatgccaaattcaaaagcaccatcaccttcatgcctcagattgcagtaggtaaaatgttcaacccttggttgggagtacgtcttcaaggaggcggcggttcgcttcacggattcaatcccgaagcaaacggcatgctccacatgcactacatgcacttacagggagatgttatgttaggtctgattaacttcttcgcaaaatataaagaagaccgcgtattcgacctcgtgccgtttgtcggaatcggaggtatgacccgcaaacacgaccagtcattcaccatccacgccggtgtacagggaaaattcagattgtctgagcgattcgatgccaatatcgaatttcagggcttgatttttgacgacgacatggtggcaaaaggcggattccccaacgacggactggcaggattgaccgcaggtatcacctactactttaaaggcagaggcttccgtgtagctccgaaacgtgccgacatggatcgtctggcagcagaaaaccgtgcattggcaagcaaagtaactgaactggaaaaccgtcctgcacaaatcaaggaagtaatcaaagaggtagaggtaccggcagaaggagaaccattggttatcccggcaaccatcccattcaaattcaacagtgcagaagtagaagatatctacgaaccgttggtttacaacattgcaaaatacatgaaagaaaacgaagatgccaaagtacgcatcgtaggatatgctgacaaattcggtaccatccaggtaaacatgcgcatttcacagaaaagagcagaagcgattgccaacatacttaccaaagattatggtatcagtgcagaccgtttaaaagttgaatacgtaggtaaagaaaaaccatactacaaagacaacaacaaatggaatcgttgtgctatgattgaagttatcaaataatattacacgtcgatttttacatgagtagaggtaaatgcctgcccgggcatttgcctctttttttttgcaagataacaccacccatttgcaaacaatcaccttctgtattccaataaaaaaaaccatcccgaaactttttaaggaatcaggatggcaaaaacaaaacacaaacccaattgcgctactgcaattggttcaaccattgaacaatttcctccagcactgccggagcaatggtttcttcaatatcggaatactctacaggagcacctgtaacagccgtctgaaacatatggttcaaacccggaaaaacaaccgtcttcacctgtgtattaccgttctctgtgataccttttttaataaactccagattttccaccggcacctgacaatccttgtcgccattaagagccaataccggacaggtaatttcaggaaaatcccattcaggattatacttcaacaattcgattttagcaacattatacaattgctgggttatcattgtcgccttgcctgccatagaggtaccgttgaaatactcggcaagtttctgttcacaagtgacggcatcccctgattgcaaaacaatatcctgcgcatgccgcatatactcgttatattgcctgataaagtcctccttcgctcccgaagccctcaacaaagccgcacgttgcatcaataacaattcactgccgcttacgccaccgcctgccaaggtaatgataaaagccgtttctttacgtcccgccatactgaatgccacgaaagcaccttcactatgaccgatgacaccgatgctgtccgcattgatttccggacgctgcttcaaataattgacagcagccacagcatccgcatccgcatccggcaaaccgctctctttcagattccctccggactttccgacaccccggtcatccacccgcaaaacagcaatcccatgacgggtcagataatccgccaacacccaaaaagtcttatgctccgaaaatgtattgtcccgatcctgacctccgctaccggaaaccaacaccaccgccttacacttcgcatcgccggcaggcaatgtcaaggtgcctgctaaagtgataccgtcatccgcattttgaaaagtcacctcttccgaacggtaagggaaaggttctttcggtgtctggggacgcttaaacaccaccggagtgcgagtcagcaccaattcaaaatcatacccctcccacaagaaagttcccttcagcgaaccgtcagcctgcggtctgaaaatactacgagtctgggcatccgcaatatttaccgtcaacacattatccgcaaatacaacctcattcgcctgataaattctatccgacaaatcgggaagttttaatgtaacctgatagccgtcaccggctttttcaacatcatactccaaacgcagacgcatattcttcaaatccggatagccgtaccacttacccgttatatcctgcgcaaccagcgtcagagaaacaaacaataaaaacagaaacgaaataattttcatgatataaatgttaaaatactaaccatacatctataatacacacaactcgacaaaaaagggggggctattattttaataaaacatcacaccaaagataaatcaaaagcataagaatagtttatacacactctgctcttataattatccaaccaacctttttccttatgactgatttgcgatatttcaccggctttcgtatttctaaactgctctgcaacatctttcaacacaccgacttccatctcatcaaatacattaagatcagattctataccagaattcaattcaataccggatgtcatatccggaaaaacatactcatccatccgtataccaggtatagaatcataaacacgcccccaattctcaggaaccggtccatacggtaatgcagaatacttcaaacctgtaagtccatatcctttacgacgataacataaaaaatccgcataaaacaacaatttgttcatcttagttacaaacacacctcccatttccttaatgaaatattttacagcagactctatttttgccggagagtatgaaacatacccagacaatgcggaaggctgattttcagggcacacatattgtggcaaccccatgatccgactatatattttcgtacaatcttgctctccaataatctgagcagaggcttcaagaaaagacaagaatgtacgcttgtccctaatcgctatcaacatacgggcatttgaagtactaggaatctctccattttcataataacggtattgatttgcaccaaaaccaagaatgtcagacatcttcaacgcagacaagccataatatttccgcaaggcacgtacctcatcggggaacggaattccatgacgaacacgatattgattataaacttgattcatgttaacttcgtcaagttcggttgtcgtccaggactctccgtctttatccataattcctacatgaatatagtcatacgactcttttctaaaaacaaccgtccgctgctccgtaaacagccgttcaccttctgcaagttttatattagtcataatcatttgttctttaacgggtaagacattggaaactctgcaacatgaaacgagatacagatagtatgagaattgggtggtcccattgaaatcttgatatatacttcagtatcattaacatccttaccaaacacccacatttccccataattattcaactcatctgttatcggcccctccgaataatcattccacttcaatgacatcaccactttttctcgcaaacgcggtgaaatttccaaatcaagcaatgcgttacggttcttgtcccgatcatcacggaatcttattccaaagatattaaccttaacataaaagttattcaaaaacttctctacattttcttttgtaatcatagcacaaagttatgatataaaaacaaaaaacacaactttaaagttgaaaattttactcctataataccgacatccccattataaccatggcaactgagtatttatgccaagccaaaaactcccaacaatctcctacatacctcccaccggggtctcactcccctctcaccattctccgttcctcccccgaagttcatccgaagtttatccgaacgagaagccgggagcttcggagaagcaacgtcacatcttcctgacaacccaagagggaagcaaaagatgggactactgcatcatggaaaaataagaaacaccagaaaaggattttcaaccatacgggcaagtttttgcttgccgttctttttatggtctttcacagtctcttcggatagccgcaaacggctggcgatttccgaaatcttcaatccttccaatgtaagctgcatcaccaaccggcattgtggcggcaactgttcgattgctgccatcagatgagcatagacatcttcttccaataccttcgcccaaaaatcatccgcctcatgaaccgaatccaacatttcccgctggtaacggtcgcgcacctgctgtttcctgaaatggctgacacatctgtttttcaatgcgctataaaggaaatacttcacctcatcaccgctgacaaaccgatgtgtggattccagtaacgatataaaaacctcctgcaccaggtcgcaagcaacctgctcgtcttttacatattggatagcaagggattttagagcaacataatatacgccatacagatgacggaatgcccggttatccttttgcgccaaatagtgtagaaggagttcttcatttggaatgcgcatacgattcttacattagaatgacaaagatagaacaatatctacaatttttcggcaaacacacccccatttttttcagtcgtgcgtactatagatacaaaccaagaaaatttacagattcattaaacaggcacaagttacgaggaaatgccaaagaaagaaagaaacataatcgaagaaacactctcaatatcaaccaaaatcagcgatattgcaggagaaatggctgatatggagacacaacaatccgtaaacgaatggcttgccgaaagcgaagagaacagggaattgtttgaaaaaatctgttcggaagaaacagcaaaagagaaaatccgcctttataaaaacagcgatgcggatcaggctttcgaccgttttctagaagcaaggaaccgacgttccaaacgcagaatgctgtaccgtattctgtcgggtgctgccgtagttgccgtcggcttcagcgtatgggggctgcttgaccggcaaaatcaggagacaccgatactgccggtagctgagaccggtgaatattcattctctaccaccgccaacaagcccgtgctgactttaggagacggcacacaaatgaatgtatcaggcaatgatatccgcatcaaggaaacggagaaagggcagcaaatcatgtccggggactcactgatttcacataaagaggattctaccgccactgatagctacaacatgctggaagtgcccgccatgtgcgacttcaacttcaccttgagcgacggcaccaaggtgtggatgaatgcagcatcatccttaaaatatccgacaaaattcgcagcggattcacgtacagtatacgcttccggggaaatctatctggaagtggcaaaagatacccgacggccttttctggtcgttgttgacggcataaccgtaaaagtactggggacttctttcaacatcagatcgtatgccaacgaaaacgacacgaaaatcaccttgatagaagggggaataaccgcacaaatcgatgaaaaggattatacgctcacaccgggcaaacagctcactcaaggcaaggcaaccggaagtgttgcaatcggagacatcgacccgaacgaagtgacaagctggctcaaaggttactacatattcaaaaaagcacggctgcaagacgtagtgagcacccttcagaactggtacggagtgcacatccgtctgagcggagagaccagtgccagcacctactacaccggtgtggtaaacaaggaagaagacatagaaatcttcctgcgacggctggaggagacctcggatgtcaaatgcagcaagaaaggcaatacagtgacaatttattaagcaatcaatttcatatttcatcaaatttaaaacaacaaaaatgaaaaagtggattacattaagtttgtgcctattcatggccggattcgcattcggacaacagggagcacaagatgaacagacccccattgaaggttacgaaatcaacggacggattacaggcaagtataccggcaaggtatatctggtcaaagaagacgggctgcacggtccccagacccgtgtagacagctgtgaagtgaaggatggatgcttccagtttaaaagtgcgacagcacccgaacacgccgtcatctattttatccaaagccatgacggacagttagctcctatttttctggaaaaaggacgcatgaatgcaactatccgcgccgaccattttctgggagccgtaaccaaaggaaccatcaacaacaacctttggactctccatcagatgaaaatcaaacactggattgacagtatgctggttgccagcagcgtacactacatgcgctacggacgtggcagcaacgaagtggaggacagtctgttcaaattccgcacttgggaacagaattccaagaaactggcattggagaaacaaatggtcagattctacaacgaccaggctttcgcaccgttcatcatgctgtttgaaatgacttctgagttgtcattggacgagctgaaagaattgagagcacaactgaatccgaaattgaacgaacacccttacaccaaatcattggacgaagtgattgccaacaaggaattcaaggtgggagtcaaagcacccgaattctccatcaagggaatggacggtgaagacattgaactgaagaattttaccggcaaatacatcctgctcgatttctgggcttcctggtgcggaccttgccgtcgcgaaatgccgaatgttgtgaaactctacaaggaatgcaaaggcaagaactttgaaatcatcggtatctctttggatcagaaggcagagccttggaaaaaagctgtaaaagaacttaaaatgacctggccgcaggcatgcgacttccaggtatggtacggacctgttgcacgcaaatacaacctgtctgcagtgccttacaccgtgctcatcaatccggaaggaaaaatcgaagcactggatttaagaggcgaggaattaatcagcaccatcaagaaattagtgaaacaaaataaaaaataacaagtgagactatgaaaaaagtattggttagtatgcttgtatgcctgttgttcatgggcgtacaagcacaaaaagtgacaaaaatcagtgccaccggagtaggatataccggcaaagtcatcgatttcgagtttatcgacaatccgtcaaacaaccagcaattccctttcaaggacaaccagaaaatggaattcgaggtggaattgtcagaaccgagtctgttgaaaatcaatgcctggctgtggatgattgtatgccccggcgatgaaatcgacatggatatcaaattccagggcaaaaactacaaacacgtggaattccggggtaccccttccgcagtagcactgaacacagccatccgtgacggtcgcatggtgcgcatcaacgaccactacaagaccaacccgttggctgccatcgtaacccgtgttccggcaaagacctactacgaagcctgccagagaaactggaagaaagaacaggaaatcctggaagccgtacgcagcaaggttgacccgttcgctttcgactatatccatgcagagttggaaggaatgtatctggacaatctggtgaaatatccgttcatgtttgccgatgtcaacaaaaaaccgcttcaggaatgcactccggaaggctattggaatgtattggacaactatcaggtaaagaccagcaaggcagcactgaaaagttatgcatacatcggatggctgattgactatgcagactattgcggaaggcgtgaagctcacaaagcaggcaaagaatacaaggaagccggcagcatggaagaaatgtacaacaagctggcacaaacatacgaaggagaggtacgggatgccgtactctatctgttcctgtacaatgctatctcaggacagcaggatttcgacgtaatcaaacgcctcagcaaggattacttcaagaaatacaacaaaaacaagaaattcaagaaggaactgacagaaatgcagaaataatccacagaagataaaacattaacaattatgcagaaaaaacacttacaacacggaatgtctgtatgccggttcctgctggcgaccttgtgtatattgctcttttcgggcaatatacatgccgcaggagagcaggattaccagcgtaaaaaaatatccgtaaaagcgactgacgaaacgattgaacaagtattggacaaaatcagcaaagctgccgatgtacggttcttttataatcattcggcacttgatttttcaaaaaaaatcagtctggacttgaaagacacagaacttcaaactgttatcagcaaagtattggaagggcagaaagtggaagtggaataccaacccaaccataccatcgtactgcgcccacaaagagtaccgacaggtgtcaccgccatcaacatcagcggaaaaatcattgatgccagcaacaacgaaccgctgattggagccagcgtcgtactgaaagagcagagaggcgtaggtgtagtgaccgaccttgacggaaactttcacatcactgtacccgaaggcggagcgacagccttagtcatcagctatgtaggctacgaaggtgaagaagttgccatcaccggtggtggagatatgaaagacctcaccatcaaaatgactcccgcatcagtagaaatggaaggcgttgtcgttaccggtatggctcctcgtaaatcagaaagcttcaccggtagttatgtatccgtaaaaggtgaagaactaaaaaaattaagcccgaacaacctgttacaggcattgcaattcttcgaccccagtttccgtatcgtggaaaacaacaaaaggggttccgacccgaatgccatgcctgaattccaattgcgtggaaatgcacaaatcggagaattttccaactcggacatgaacatgctggtaggtaactattccaaccaaccgaacatgccgctattcgtattggacggttttgaaaccactttgcagaaaatcgtagacctcgacccggaacgtgtagaatccatcaccatattgaaagatgcttccgccaccgccatttatggttcgcgtgcagccaacggtgtagtcgttttcgaaaccaaaaaaccgctgccgggagccttgaacgtcagctactccatgaatatgggtatcacaatgcccgacctgtcggcatacaatctgatggatgccgaagaaaaactgcaattcgaatatgacgcaggactgtactccttcacttctgaaggtcagccactagtaggcgaaatgcttgccaaccagcgcaactactacaaccactacaaacacgaaatagaccggggcgttgacacctactggctgtcagaacccgtacgtacggcagtcctgcaccgccacaccctctctatcgacggtggtgatgaggcataccgctacaatttcagcatcaactacaacaacgaaccgggagtcatgaaagaatccggcagacagagcttgggactgaacctgaacctgacctaccgccgcaagaaatggaacgtatccaaccggctgagcatcgacaacaccaaagggacaaacagtccctacggcagtttctctgaatacgcccaactaaacccttactacaccaaaagagacgaaaacggcaactatcagaaagtattagacagaaaatccctgggtccgggtatcggaacaaaagacatcaccaacccgctgtacaacactcaatatccgttcaagagtttcacgaaaaacttcaatgtaacagacaatatgtctattgaattcgccatccgtgaaaacctgcgtctgaacgcacaattctcattaagcaagggtaccgccaacggtgaagatttccgttccatgaaccacaccatgttcgccaacgaagacgacatcaccaaaaaaggttcatattcacgaaacgaaggaagcaccttgaactggagcaccaatgcctcgttgaattacaacctgaccaaagacaaacacttgatcagtatgttcgctcgttgggaaatcacccaaaaccagaatgaaggaatcttcttcaccgccaaaggattcccgaacgacaacatgaccgatttccttttcgcatttgaaatggaagaccgagtaaacggctcggaaaccctgacccgaagcatgggcgttaccggacaaatatcctacatgtacgattaccgctactccatggacttcagtatccgcggggatatgtcatcacaattcggtgcggacaccaaaatgaaaccgttctgggcaatcggagcgagatggaacatttcccgtgagaaatggctggaagagacttccgtatccaacctggtgctgcgtgcatcctacggtatcaccggttcgcaaaactatgacccctaccaagcgatagagggatattcattcgaagagatgatgcatccgtatctgtcatccggtgtattgggagcggaactgctgggattcggtaatcccaacttggactggtctaccacggaagacttcagtgcagccatcgaactgggattcttccagaaccgactgactgcatccgtcaactattacagccactacaccgaccagttgctgctggactacaacattgccccttcggcaggattcccgaccatgatgaccaacatcggagccatctccaacaaaggtgtggacgttacattaagctttaccccgatacaggactacgaacgccaactccaatggaacgtctccctgaacggaacacataataaaaacgtggtgaaaaagatttcaaacgaaatcaaggcactgaacgaaaagaacctcaacgacaagaccgcaccccttcccatctacgaggaaggtaagagtacctcgcaattgtttgtggttcgttcattgggtatcgaccctgccaccggtaatgaaatcttcctgaaacgcgacggcaccaaaaccttcaaatgggatgccaacgacaaagtggctgtcggagacaccgaaccgaaattccgcggttccatcacttccggtctgacctggaaagactggtctgtcaacctcggattcaactatcagttcggggcatatctgtacaaccagacactggtagaccgtatcgagaacgtaaacctggcatacaacgtagacaaacgtgcagccaaagaccgctggcgcaaaccgggagacattgccaaatacaaatccattgcctacaacggacgaacaacggaactgtcttcccgcttcgtgcagaaggtaaatgaaatccaattttcttccatcgcagtgagctaccactttgatccgaagaaattcaattttctgcaacgctgcaagattgccggtctgaacctgacaggaaccatggaagatcttggacgtatctcgaccgtgaaacaggaacgcggaaccgactatccgtttgcacgtaccattaacttatcattatcggtattattcaactaaaaaagggaaaacaaaatattatgaacatcaaacatatcctatccatattggtcatagccctctgcggcagtgcctgctccgattggtttgacgtatcgcccgacacccaaatcaagtctgatgagttcttcaaggacgaaacgggattccagagcgcactgaccggatgctacatgcgcatgaccaaagacgagacttacggcaagaacctaagctactattttcttgaaaagctggcacaacgttacgatgacaccgacggcaaacttgccggacgaaacgccaatgtgtatatatacacagactcggaatattccaaagacatccttgccaagatctggcaacacatgtaccaaaccattgccaatatcaacaacctgattgcccgtctggaccagaacggcaaagaggtaatcaagacacccgggagctgggaactgatgagaggagaggcacttgccctgcgagctttccatcatttcgacctgctgaggatgttcggtcctatctataaggacgagcccgagatgccatgcatcccctaccgcactgagttcaaaccggagaaatcacctttgttgagcgcaagcaaggtattggaaaacatcatcgccgaccttcaggaagcagaaaaatacctggcacaggattccgttgaatggggagcgatacccgaccgtccattcgatgcctaccgaggccaccgcatgaacaaatatgcaaccaaagcattgctggcaagagtgtatctttaccgcgggacggatgctgacaaagccgaagccggccgtctggcaaaagaagtgattgaccattgcggcttgaaactggtacgcgacaatcaaatcgacaatccgatgtggaacgagaccctgttcggtctgaacatggacgaaatggaagaccgcgtacgcgattacttctcaacaagcagtgctgacaacggaaccaaactatggatcaaacaggacaactggagcggactttacgaaaccagccaatccgtcggtatcaacgacatccgaggcaaggaaaactacggattttatccgggaggaaccaatggcaagatgtgccgcaaatatctgccttcaacagatatacgatacactgaaaaaataccattaatccgtttgggcgaaatgtatctgattgcagccgaagcgaccggagatgtacaatacctgaacgacctgcgcaatgccagaggaatttccatcagctgggatgtggaaaacgtagatgaagcaaccttagacaaagaataccgcaaagaattcttcgcagaagggcagtatttctatttcctgaaacgccatgccatgaaaactttctaccgttgcgtacctgaactggaaaacaaaatgtccgaccgtcagtacgtattcccattgcctgacggagaaaaagaatacaactggtcggcaggagaaaccaaataaacaaacacattaatttcaaattatgataaaaaacataccatacatctgtctactactgcttttcgcctgcggatgcgagcaaaaggaatcctttgaatatacggacagagacgcattgtatttcatgctgccgaaagaagccggagaaccttggactgaagggaaaccaaaggcattggaaacaacacgctcattcgtcagattcaaggaaacaggcatgaacgagacattctggtatcctgaatatgtagcggacaccatctcaacagacacgatgacaagagtaagagtagccgtagccggcactttatccgcaagcgcacgcgactaccgtctgaaaaccgtttctacagacagtacgccggctctggcagaaattaaatacgatgaaaaatacagcatcagtgccaacgaaatgaaagacaccatccagttcgtcatcatgcgtcccaaggatggagaggaaagcacggcaggctatgttacattcgatacagaaaactctccggcattcccaactagcataacaggatgggatcgtctgaaagtcaactgcgtatactatgcaaaacctgaaaaatggagcaacgacatattcggagtcttctcacaagcaaaatacgccttcatggttgaaacgttgaaaacaacctacaactattacgagtggataaccgacgacaactggcaggctacatacggacttccagaattgaggaaggcattgaaaaaatacaacgaggaacatccggaaagtcccaaagactttacatttccgggtatggaataattaccaaacgataaagagaatttaaaatgaaaataaacaaaccgattatcggatgcgccttatccgtattgcttttctcctgctatcaggacaaaggcaactacgactataaagacgtgaacaatttctccctcagtttttcacccaaaggtggagaggggaacatttatctgattaaccagccaggctcacaagcagacacattcctgctttccagtgtagtgacccagaccatcaaccaagatgacagtaatctgaaatacacttggtatcgcagacaaaccatagacggagtcaaagaaccatacaaagataccatttacgggaaagacaattatatggtgttccctaaatcgaaaaaaagctcatgggatgtgactttggttgtccgtgacgaaaaagccgacctcgaatattacaaccacgccatcgtcaagaccaaagtcccgtttgtcaacacctggaacttcctgcatcaagacggcgaacaaatgaaactgggaaatctggaaatagacatggagggcaatgcctcctggcaaccggacaacattaaactaatgaacaatgcctctttcccacgaatgaccactgtggcatacatcccgcacggttctgacgattttgtagaattggagcgtctgttcatacagtcaggtacggacagcattaccctattgaatccattctctcttaaaattaaagggacatggcaaaaattcaacatgcagccgggtaccaaaatcaaaaaaatcgtagggaacaacatggcgagcagtcctagaatcgctttgattgatgccaatggaaaattttattattcacaagattggggaactccaaaattccaacgttcaaacgacaaagcatatccggatttgaatgtaaccgatgcctacatgaatgcagaaggtaaaactattctttgggatgcacacaactgccagcttttaggctgcaccgatgcaggagaacttggagcaatcgacggaatccatgccaaccaattgaaaaacaaacaggctatctggttgggacgaggaactacaatcaccaaatcaggagaaggagaaaatgcgctctgtattctgagagacaagaataacggtcgctattatttctggaatgtagatttcggcaagagcggtggtgtgtacggcaatgcacattgcgactcactggacagttggggactgaccgagaagagcctgtttgccgtcagcaatgcttgggacaatcagatattctttgccgaagacaacatcatctatctgggacgtttggacagtaaggaaaaaagcgttgtctaccgcatgaaagagggttacgaaatcaagaaaatggcattcaaagtctgcaatgcctccacacattttagcaatcaggataaattattctacttgggtattattgtaaccaaagacggcacggattctttgtgcgagctgaaattatccattgcagcagacgtggaagaggctaaattctacgacttgggagaacacacaaccgttgcagactttttcttcatggcaccgcaacacgaagttgacagataaaacatacagatatgaaaacactattgacattgcttttaagcaccctgctgctaatagcacagggacaagggaaagggaagactttctcgatttcagggaagatagaactggacaaagggaatctgctggttcttgcccaacaagctgaaaaaatggatactctggcaaagactgccatcgccggacaacaattctccatcagtggcgaagtgaatcaagccgtagtggcttatctcgtcattgaaggttacgaaggcgggttcgtcatgatgctcgaaccgggcatggaatataccgccacactgacccaagacggcgacggcaacatccatggaggcaaactgcaagagtcctacaacgactaccgctatatcgtggcacaagccaacaccgaaagccgactgctaaaccagaaagcagacaaggctgctgcacagaaacacttcaagaccgccaaggaatatcaggcaaaagccgacaaagtgcaacaagtcgcagcggacaaattaaacaacatcatccgcaaaaatgccgacaacgtactggcagcattcctccagacagcaggctcggaaaaaatcaccgaactggaaccgctgaaacaggtgtacaacaccctatcggaaaaagccaaacaaacggctcccggactgattctggcaaaacgcatcgcagacatggaaaaggtaagcatctctgccatcgcacctgatttcacactgactactccggaagggaaagaggtttccatgtacagtctgaaaggcaaattgaaaatcatcgatttctgggcttcttggtgcggaccttgccgtatggagaatccgaacatggtaaagctatataacgacttcaaagacaaagggctggtcatcatgagcgtttccctggacgaaaggaaagctccttgggtacaggcaatcaagaaagacggcatgccctggacgcatgtttcgtcgctgaaaggctggaaatgcagcgtagtgcaggaatacaaagtaacaggagttccttccatcatcgttctggatgaaaacaaccgcattttggcgaaaaacatccgggctgaaaaattaagagcgttcgttacggaatacttgaaataatgtctcaaataattttgtaagtttattcaaatcggggctgccggcactaaccgcagccccgattgtcatataaaaaagaaatcgtatctttacaagcactaattaaaaggaaacatgaaagtaaaaatacaaacgacactaggcgatattattgttcgtctttacgatgaaacgccattacatcgtgataattttatcaaattggtcaaagagggttactataacggaaccctcttccaccgggttatcaaagattttatgattcaagggggagatcctgattccaaagaagccccagccggcaaacatttaggagttggcggtccttcttataccctagacgcagaaataaaaccgggtctattccacaaacgaggagccttggctgcagcccgtcaaggcgatgaagtcaatcctgaacgcaaaagtagcggttcacaattctacatagtgtggggaaaagtctataatcaaagtcagttaggccaattagccaaacaattagagatgcaggaagcccaaaagatatttgataacctagcctttcaacaacgagctacaatcatgcaactacgccgcgaacgtaatcaagccggcttgcatgaattacaagaaaaaatggctgcagaagccatggcccaagcaaaagccaatggcccggtgttgaccgatgaacaaaaaaaggtatattccactatcggcggcacacctcatctggataaccaatacaccgtattcggcgaagtagaagaaggtttggatgttgtggaacaaatccagcaaacagctaccggccgtaacgatcgcccccaagaggatgtgataatgaccatgactatggtagagtaagaagataaaaatcatagaatatcatttcatagcaacgctccctgctacacaaagcgaccttgccaactatctgctgaaagacccgaatatctttgacttggcagaagccaaagaaaaagcagacgaaaaggatattgaagaacagatggtaaaacacgttacccgttacctgttagaaatgggcaacggttttgcctttgttgcccgacagaagcattcccaagtaacgcgtcgcagacgaaaaaaggaaaatccgtaacacggttgaacattcagccggattacggattttcttttctatatcattatgtttattgtgttcgcagcagtatcaggtcgaaatacatcagccgggtgtgcatgggctgcatgactgattgttcttctgccgttctcctgccgtgcaggaaagtctattcctcttcctctgtggaaaacaggaacttgaagccgttccgctgataaaaatcaaatatcttcggattgttcagggcatccaccactatatagcggcatccggttttgttcaatggctcgatgaaccatgacttgatggcatccagtatctcatcgccgatatgctgtcccatatagccgtcactgacggcaagctgccccaccagcaccgcaggatattggggacggcgtttctcgttggggatgttacggttgagcctgttacgccggctgttcgggagcaggtctgcacggatactcgaattggctacggtgaaagctccgacgatgcgatgcttgtcttgctccacgaagcagtaggactttcccaaaagctggtaggcataatccgcatactctctcgtgaagaactcggttatatccctgtccttgcacaagaagccgccgcattcgcgcagcacgtcttcattcagctcacagaactcacaatactccagcataccgtcctatccctccttatctatattgtacagtctggagcgtttcaggatagcacgcatcttttccacctgcttcgtgaagtctatggaaccgcgcctttctctggcgttcctatccgcttcttccacgaaacgctccgccgccttgccgcgaagtaccggaataggtttaatttctaatgccataatctattgtattataattgtttctgcaaaggtaagcaatttttcgcagactatgacacccatgcctcattttctcgttatcttttccggatccgttcccgttcctcatcctcctgaatccgtcggttcaatttcttcgcatccttgtcgaagaataggtacggctgtcgttcttccaacgcttgatatccgtattagtgttgttatgaatcaatgattttatggacttcatttttcggtcactgctacattttttgaggggtcttcaaagtgtagcaataaatgtagcaaataatgaccgaactttgaaggctaaaccctacattcaggcctccaccttgttgagcgcaaaaataaaaaagcaccgtaatcagctgatatacggtgctttgaatgactttttgaaggcttttgtgaagtccttcgtctttgttctctgcggagagagagggattcgaacccccggtagcttgcactacaacggttttcaagaccgccgcattcgaccactctgccatctctccatttcgggtgcaaagataatggaaaaatataagttcacaaaaaaatcatgccctattttgcaaaataaaaatcgacattttatttgcagactaaaaataaagcactacttttgcatctgcattctcgggatgtagctcagcccggtagagtacacgtctggggggcgtgttgtcgcaggttcaaatcctgtcatcccgacaaagagatcagcatatagctggtctctttttttgtaaaagcacagatatgttattgtctgcttagagataaatttctatttttgtccattgtataaatcaattggtgagaataatcgtgaatttcattaacgaactgaatagtagtcaacaagctgccgttatcaatacgacaggtccttcattagtcattgccggagcaggctccggcaaaacacgcgtactgacatatcgcatagcccaactgctcagtcaaggagtaccggcacataaaatattagcattaacctttacaaacaaagctgccaatgaaatgcggaaacgtattgcagatttggtcggtaacgatattgctgtcaatttatggatggggacctttcactctattttctccagaattctacgatttgaggctgaacacctgggatatacttcaagctttacaatctacgatacccaagattcaaaaaatctaataaaaggaattgtcaaagacatgaagcttgatgataaaatatacaaacccaacacaatattagggcgtatttctatggcaaagaacaacctgattgtagcacacagctatgctcaatcagcccgaattttatcggaagactctgcagccaaacgacctttattaggagagatatacaaacgctaccaacaacgatgtaagcaaagcgacacaatggactttgacgatttgctgctggaaacaaatattctgttcagggatcatccggatatattggcaaaataccaacaaaaatttcaatatatcctggttgacgagtaccaggataccaactattctcaatacctgataattaaaaaattatcagaaatacaccgcaatatctgtgttgtaggagatgatgctcaaagcatatattcgtttcgtggagcccgcattgagaatatccttaatttcaaaaatgactatcctgattataaattatacaaactggaacagaactatcgttctaccacaacaattgtagacgccgccaacagcgtcatcagtaaaaacaaagaacaaatcccgaagcacacattctcagaaaatgatgaaggcgaaaaaataaaagtaatgcgcgctttatcggataaagaagaaggatttcaagttgccaatgaaatattccgtctggctcattaccaacaacaggcattcagtgactttgctatcctctaccgtacaaatgcgcaatcccgaattatggaagaagcgctacgcaaacgtaatattccttataaaatttatggaggtcaatcattctatcagcgtaaagaagtaaaagatttacttgcatatttccgactgacggtcaatcagaatgacgaagaggcttttaaacgcatcatcaactatcctcgccgaggcatcggagattcgactattgacaaattacaagaaattgccaaccaataccgagtaagtctttggactgtgctatgcaatctggataaggtggcaccagtcttcaatgcaggcactctagcaaaactgagaaaattcggttctctcatagaacaattccgcgaatacattaccaatgaaaatgcctatgatgcagccaccatcattgcacgttcctccggcatcatagaggatctttccaatgatgatacccccgaaggtatatcccgcaaagaaaatatacaggagcttttgaatggtatcaaggaattttccgaaacagcctacaaggaaggacgtgatgacaaacttccggccttcctagaaggtgtagcccttttgacggatcaagacggagaaaaagagagcgatatcaacaaagtaactctcatgaccatacatgcatccaaaggacttgagttttccaacgtatttatcaccggtatggaggaagagcttttccctgcacaacaaagtgtcagcacaccggcttcattagaggaagaacgccgtcttttttatgtagctatcacccgtgcagaaaaacgtatctgtctgtcgtatgcaacgacgcgctataaaaacggacaaattacatcttcgcgtccctcaagatttattgacgaaatagatagtgaattcctagacggacacatacctctacgtaacgaaccatccggattcaaactgaaaaaccgcccgattgtacctagccgtaaacccattacctcttttgccaactcaagcaataacgttgatattcctcctattgatcgagccaaattacgccctattgattccaaccttgtggtgccagacatggttattttccacccgacattcggagccggacgagttattagcctagaaggtttgggggtacagaaaaaagcaaaagtagcttttgctgaaggaggaactcgcatattattgttaaaatttacaaaactatttacacaacaagattagacacaactatttataatttaaaatacatatctttgccgaacaattcacaccaaaggcgatagctttctagcctaaaagttgtgcctggttaaaaacatataccctttcatggaatttgaatataatacccaaaagaagaagctagtacttcctgaatatggtcgtaacatacaaaaaatggtagattttctcctcacaatagaagatcgtgcagagagaaccagtgctgccaagactgtcattgatgtcatgggaaatctatacccacacttacgtgatgtaccggatttccgtcataagttatgggatcatttggctatcatgtccaatttcaagctagacattgattcaccttatcctctaccttctgtcaatattttacaggagaagccagacagattgccttataataatcacaatattaaattcaaacattatggcaaactgactgaaaaattgattgaagccatacgcgaacagcaagatcccgaactcaaaagagctctcatcgtgcttaccgccaaccacatgaagaaatcattcctcacctggaataaagactctgttgaagatgaacaaatatacaaggacatcaatactctttacggaagtacacttattctaccggaaggcatgactctttccaatcccaaagatttactacaaaagaaaagcaaacccagttcaaacaagccggcaaacaataaaaactttcagaaaaaagcaaacaacaataaccgcccacacttcaaaaagcaacaaaatcaatgatagcaaccattttgggcagcaactccggagataagtatcaattactcaaagaagccgcacatttattgtcggcttccggtgaaatcattcaacagtcctcgttctatgaaacagaaccttggggctttgaatccgatgaaaattttttaaaccaagtaatcatttttgaaacaccgctaaatccatcggactttctccatcgctgtcttgaagtggaaaaaaaattaggtcgagtacgtaatcccaacggtccccgttacacttcgcgtcctattgacatagatatcctgttttgtgattcacaaatcatcaataccccggaattgattgtaccacatccccgcatatgcgaacgacatttcgtacttgctcctctggctgaagtgatgcctgatttcatacatccgggcaaacagaaaagcgttctggaactgctctctatttgcccggaccattctattgtcaaaaggatataatccctaaaaaatcactctattcgcacaatatctgctccaatagcattcaatttttcatcgatatgttcgtatccacgatctatttggtctatgttatgaatcgtacttactccttgtgctgaaagtgcagctatcaacaaagctatacccgcacgaatatcgggagaagtcatttttgtagcacgcaactgagcctcgtggttttgtcctatcaccgtagcacgatgaggatcgcacaatataatctttgcgcccatatctatcagcttatcaacaaaaaacagacgactttcaaacattttctgatgaatcaacacactgcctttagcctgtgttgccaccaccaagaacacactcaataagtccggtgtcaagccaggccatggagcatctgctaccgtcaatatagaaccatcaataaaatcctctatcatatagtgttcctgacgtggaatatacaaatcatctccccattcctcaatcctgatacccaaacgacggaaagcatccggaataattcccagctgacggatatttacatccttaattgttatctcagaacgtgtcatggctgccaaaccaatataactgcccacctctatcatatccggcaaacaacgatgagaacacccgcctaattccttcactccctcgatggtcaacaaattggaagctatacccgatattctggcccccatcgcattcagcatcgtacacaactgctgaatataaggctcgcaagctgcattataaatagtagtgactccttctgccaatacggctgccataatgatattagccgtaccggtcacggatgcctcatccaacagcatataacatcctttcaaccgttctgccgatgctctaaaatagccgtcagtactattataatcaaatgtagcacccaatttttcaaaccccaggaaatgagtatccaaacgacgacgtccgattttatctcctcccggtttaggaataacaccaaaaccatacaccgccaacagaggtcctaaaatcataatagatccccttaggctgactgccttattgtaaaaatcctcactctcgaaatagtcaaaatttatatcagaagcttgaaatacaaatgtgccatgctccggatgctccaccttcactcccatgcctttcaacaactcaatcagcttcatgacatccaaaatttccggaacatttgaaatcgtcactttttcttttgtcaacagacaagcacatattacttgtaatgcttcattctttgctccctgcggacgaagttcacctttcaaacggcgtcctcccgttattataaatttactcatatcgtcggtattagttcataacgtcaaaattagacaaaaacctttcaatacacaaataactctctgcagatatttgttataaagaaattatatggctatttttgggaaaaattttatcattgccatgaaaagtttcctaaaatacacattagcgactattacaggatttcttgttgtcaatatttttattttcatcctattattcattttagttggagccatcttgacattttccaatcaaacagtctccgtacaaaaaaacagcgtgttgactatccggctagaatcacctatcaatgaccgagcttctgacaacccatttgacaacatcgactttctatccatgagcactctaccgaatctaggattaaacaaaattctagcctccatagaatatgctgcactcgatgagaatatcaaaggaatctacctcaacattaacgacatacagagcactttcggagccttggctacaacccaggaaatccgcaatgccctacagaaattcaaagaaagcggcaaattcatttatagctattccaacttaggctattcacagttaggttactacctggcaaccgttgctgacagcatcttcgtcaatccagagacacctcttacgctctccggaatgagtagcaacgtcacattctataaagagactctagaaaaattaggcattcaaccggagattgtcaaagtcggaaaattcaaatcagcagtagaaccgtttattgcaacggaaatgagtgaagccaaccgcgaacaaataaaaaaatacctaagtacatcctggaacaatattgtcaaggctatttcctccagccgaaatattccggcagactctatcaatgccttaaccgaccgactggatttttatacaacccaacaacttacagcgtggggatattttgacaatgcggtttatgaagatcaaatgctaacctttctcaaaaaagcatgcggaatagaaccagaccaaagattacaacaagttcaactaacagactatcaaaatgccatatcggcatttgaaaaccaaccctatcactccaacaaaatagcaatcgtctatgcacaaggagaaatcggattggcacaaacacccaaatccattggtccggaccttgccaaaagcatccgcaaagcatgcttagacaacaacataaaagccattgtcctacgcgtcaactcgccgggaggcagtgctcttacttccgatatcatatggagagaagtccatttggcccaacaagaaaaacctgtcatcgtctccatgggcgatgttgcagcatccggcggctactatatttcatgtgcagcagacacaattgttgccgagcctacaaccttaacaggttctatcggaattttcgggatgttcttctcgggcgaaaaactaattcaagacaagttaggcatccattccgatattgtaaaaaccaacaaacatagtgatttcggcggaacctatcctctgccgatacctatcagttcacgccccttaagtacatacgaaaagaatgttctgcagaactacgtcaatcaaggttatgaaacattcctcagtcgtgtcatggctggacgcaacatgactcatgatcaacttaatgccatcgcacaaggacgtgtttggacaggagaagatgctcaacaaatcgggcttgttgacatattgggtggcttagaagacgctatcagtattgcagccaacaaagcagggattgaccaatatatgctggttgaatatccgactctcaaaaatccgatggaagaactactataccaattaagtggagggattaaagcccaaatgctacaagaagaaatgggaccactctattctacttggcaagagataaaagaaatcacctcccaacaagggattcttgctcgtcttccatttaacttaactattaactgattcaaacactagcgcatggcaacaaaaaacattctgctgctgccgttcagctttctgtacggaattggtgtagggataagaaatttcttgttccaaacatctatactaaaatcacaacgatttgctatacccattctgtgcgtcggcaatatcacggtcggaggaaccggaaagactcctcacacagaactcattatcgaaacgctacgtcatagattcagagtcgcctgcctaagcagaggctataaacgcaatacgtccggcttcatcatggcgacaccagaatcaacagcttcagacattggagacgaaccgctacaaatctataaaaaattcccagatatcctggttgcctgcgacagcaaacgcgtgcgtggcattgaaaaactattggcattacccaatccgccccaagtgattattttggacgatgccttccaacaccgttatgtacaggcagacaaaaatattgtactgatagatttcaaccgcccggtcactgaagacagtctgttacccgccggacgattacgggaaggtgttaatgcattaaaacgggcagactaccttattgtcaccaaatgtccgcaacaaatgaatccgattgatctccgcatctgttacaaaaggctgaaaataaaaccttatcaacaattattcttcacctctatcggttacggagagattactcccatttttaaagaacaaccgataatcagtccaagcaagagcagtagcatactatgcctgaccggcatagcacaaccggctccatacgttgaatatctgcaacgcttcacttccaatatctccaccttggagtatccggatcaccatcattttacatcaaaagacattcagcatataaccaatagattccaagcaatagctaacgaagaaaaatacatctttacgacagagaaggatgcagcacgcctatgcggttgcgctctccctgaagaattaaaacaacacatctattatattcctgtcgttccggaatttcttaaagataaagatttgtttataaacgaaatatttgaatatgtacgaaaaaatcaaaaatagtgcggaatacatttcgcgctttctagacaatgaagcatataccatcggtattattcttggcacaggactaggagagttaggaaaatccattgaggtaaaacataccattccttattccaccatacccaactttccggtttctacggtacaaggacacaaaggtaaccttctgattggtaaattcggtggtaaaaatgtaattgccatgcagggacgtttccacttttacgaaggttatccaatgacagaggtcacattccctgtgcgtgtattacatgaagtcggagtgaaacatctgttcgtttccaatgccgcaggaggtgtcaacacgaactatttggtcggagatttgatggtaattactgaccatatcaacttattcccggaacatccactacgcggacgcaaccttgacgaactgggaccgagatttccgggcatgacagatgcctacagcccccgtatcatcaaaatagcagatgaatgtgcccaacaattggatattaaacttcaacacggagtgtatgccggcctgcaaggaccttcatttgaaacaccggcagaatacaattggattcgtgtaatcggaggtgatgcagttggaatgtccaccgtaccggaaatcattgttgcacgtcacatgggtatggaatgttttggaatgtctgtcatcacaaacagcaccgcatcaccggaattaatcaaaacaaaccatgccgaagttcaagatatcggcaataccgcccaacctcgaatgactgcattattccgagagattatcagcaaactttgatatattcatgcacagacctgcacccacaacaggcaagtctgtgcattaaataaaatgcatgaatcaagagttttctctaaacataaaactattccaaaaaggagacaaaaaagcattcaaaataatctttgactgcctatttgagaatatatgcctgttttccaaccgatttatcaacaacatgccggctgctgaagatatcgctcaggaaacgttcatctccctatggaaccatcgggaagaaatgcaatctgctgcacatatcaaatcgtttttatatatctgtgcccataatgcagctattgactttctgaaacacgaaaaaattaaagattcatacaatatccatgcgctccaagaaatagaaacttcagaaacattcatacattttgtcatagaggaggaagttgcacaaattctacaaacaacggaacaagaactcccaactcaatgcagacagatttttaatttagccatgcaggggatgtccaacgaagaaatcgcaacacaaatgggcatctccataaatactgtcaaaacacaaaaaaagattgcatatcgccgcctgaaagaacacatttccttacttggcagcactattatatggctcttgtgcaaataattgcaatctaacctgcccaatttatccttttccatcttctctctaccagacatccctataaaacaaccatatcccatctatatcacttccaatatacatattatagcaaccttatattaatccattaaataagctatatacataggattcatacagcattcatataagattcatataggattcatcaaggattttacttagagttgatatagaataaatatagacatgagcagttacatcttaatacgtagagaatagatgaaaaaaaacattttttttcatctattcttcaccctactctatccttaaatcgtaatagatatataaagcaaagaaaaatggagaacttacatcaacactttcgcatatcacgcctcatcgtcagcagctttcaaaaaggcttgacgctcgaggaacaaaaagagctcaacgcttggctggaaaatccgaccaatcaagctttctatgactctttgtacaataaatacatacaaaataaaaaccatgctcccaagcaatcgattatcaacaaggatgccaactggaaaaaaatagaaaccagaataccattcaaaaaacattattccattcaacgctggatgaaatatgccgctatcttaacattgcctgtcatactgaccattttattactaactcatcaagaaccgacaacatctagcctaccacttacagctgtgaagataccccagccaggaagttcgaaggcagtgttattactggccaatggtcagcaagtagatttaacccaacagcaagaactctcacaccccattgacacaacgataacccttaacaatcaaaataataccttaacaatagaactgtccggcaccaaacacgccaaacagacagactatcaaacaatttttattcccgtaggcggtgaatacaaacttgtcctggcagacggaaccaaagtatggctaaactctgacacacgtttacgcttcccatctacctttacaggaaatacaagagaggtttatctggaaggagaagcctattttgaagttgcgccaaataaagcacatccctttattgtaaaaaccacacccatggaaatagaggtattagggaccaaattcaatatcaaagcatatccggcagactcagatatctataccacgctagcagaaggttctgtaaagactcgtactcagactatcggagaagcgtgcgtactgattcccaaccaacagaaccaatactccaaaacgacaggacaaatgacaacgaaaaaagtcgatgcacaaacattcatcggctggacaaaaggagtgttcatatttgaaaacgaaacgcttgaagagatcatgaagcaactgggccgttggtatggaacacaaacaatctaccaaaatcaggcattaaaagagtatcgttttaccggctacgtaaatcgcttcgacaacatatctacaatccttaaaatgatagaaaaatcatataacataaaattcaacatacaaggtaacagcataatagtaaacaattaatcaaataatgaaatttatcatttaacattcaaattatgagaagattacgactaaccatgaggctactagcaattttttgtctggtattcgtacttaatgcaagtgcactaccggggcgggctcaacaaacagaagtacaactaaatgtacgcaattcgcaactcaccgaagtactgaaacaggtgcaacaacaaagcggttataacatcatctacagtaatgatttactgaaaaatgtatcccctgttgatgtcaacatccaaagttccgacattcaggaaatcatgcagacttgcctgaaagacacaaatttagatttcgagattcagaacaacaccattattgtcaaagcacgtcttgctattccacaggagcaaaacatgcaaaaagtaaaaggtacagtcattgatgccaaaagcggtcaaccaatgccgggagtcactgttgcagcgattgccaacggacaagcaattacaggaactgcaacaaatgcagacggtaatttcaccttgaatttacctgccggtatcaaagatttaacttttaccttcgtcggctacaaagctgtcacactccctatccagacaaacaaagagatggttgtacgcctggaagaagaggtcaaagccatcgatgaagtagtcgtaaccggttactttacaaaatccaaaaacagctataccggtgcagtcaaaacaatcaaaagcgacgaactaaaggctgtatccaataccaatatcattgcagcaatcagtgccctgactcctggattaaaccttgtggaacgcaatgatcttggttccaatccgaatcatgtcccggaactgctactccgtggtatgagctcgttttcagcaacaaacagacaagtaaaccaaccgacaatcatcttggacggagtagaaatcagtatggaagagctttacgaccttgatatgaacgagatagacaatatcaccgttctgaaagatgcatcagcaacagctctttatggtagccgcgcagctaacggagtcattgtcgttgaacgcaaaaaattaacagaaggcaatatccgtgttagttacaactttaccgggaatgtccaatttccttatctcaaagactatgatgtattgaatgccagagaaaaacttgaatacgaaaaactagcaggattgtacactccggttcaagaccaatggggcagcgtagatatgggtaaagaacaataccgcctagaccaactatacaatgaacgatataaagaagtttcacgcggagtaaataccgactggctttctcaacctgcccgtacagccttttctcacgaccattcactccgtatttatggaggagcatccaatatccgttacgaactatccggacgattcaacaatacacaaggtgtaatgaaagaagactaccgccgccgttatggactcggttttaaattggaatatcacttagccaaccaactgaccttcgccaaccgcaccaactacaacgagacagatactaaagatactccctacggaagtttcaggaattgggtaaatcaaaatccatacgaccgtattttcaatgaatatggtgaacccaaccgcaacctttcttggaacaatgacaatccgatggtagaggctctgctcggcaactattccaaaagtgccagtaaatcactatccaatacaactgatgtacgttgggatatcaatgatttattccgcattgtaggaaatttcaacatttctatcacggatggtgatgctgaaacatatctgtctccggaatcccaagtattcaagacagaaacagacctcagcaaaaaagggcgtttggacaagaccacaaccaaagcggtggattggtctggaaacatcaatgcatcctttaataaactgacagaagacaacagtctgctcagtatcatcctcggcggtgaaatccgaagagcaggaatgaaagcagcaacattaaaagctgccggattctttgacgatgaattaaatttcatcggacatgccaacggttatcctgtcgaagatactcaaaagccaagcggttcgcaagacctgagtacagaagtcggattctttgccaatggtaactatatgttcagaaaccgttactacgcagactttgtatatcgtctctccggttcttctaaattcggagcagatcaacggttcggacaattctggtctgccggagccggctggaatctacataacgaaagctttttaaaatcagacaaattagatttattgaaaattcgcggaagtgttggttataccggaaagaccaatttctctccattccaagcaatcaccatgtacaaatacagcaatgacttggaatatctaaacggtatcggagccattccgcaaaccataggaaacgaagacttaaaatgggaacgtgaattctcatacaatatcggagcagatgtcagtttgtttggccgtcgtttgaacgctactgtagattactatctgaaaaagaccaaagaccttgtactttctgccagcaaagctccatcaaccggtgtgatagaaggaatggagaatatcggagaaatggaaaataagggattcgaattctctatcgacggaatgctgattcaacgcaatgacttctggtggcaattaagtatgaacggttctactaacaaaaaccgcatcttaaaaatcagcaatgcattaaagaaacagaatgaaagcaacaatgacattccttcatccatgagcaccaaaccattggcacaatatgaagaaggagaatcaacaacagcactcaaagttgtgcgttcagcaggcattgacccggcaaccggtcaggaagtgttcatcaaactggacggtacccgtacattcctctattccgcagatgacaaggttgtagtaggagataccgagcccaaattccaaggaaccgtttccaccaatattttctataaaggattcagcctctatttaatgggaacattcaaatgtggtggctatctttacaatgaaacccgggcaaccagagtagaagggaactcaggcaagaccaatgttgaccaacgtgcctttgatgaccgttggaaaaaaccgggagacattgccatttatcgcgacatagccaaccattcgacacccgaacatacagaccgttttgttgaaaaagagaatgtatttactttaagttctgtcaatctaggctatgaattttctccacgcatctgtcagaaactgatggtaagaaacttgcggttaggagtcaatttaaccgatatactcagactttctaatgttaaagtcgaacgagggctcacttatatttacagtaacggatttgaatttactttaagtaccactttctaatcattgaatcatcatgagaattaatattaaaaatatagctgttattttaggtctgctgattttcggcacatcctgcgataattttttggacgtacatccggatggcgaagtattaggtaaagatcttttgaccgaccgcaaaggatttgaaaatgccatgtatggagcttatgcaaccatgcgcacccccactctttatggaaaaaacatgagctactacaccttggacatcatggcacaatatttttcatgccaaggaaatcaaggaattacagacttatctgcattcaattattataaaaatgctgatgtaaagaaattattctttgatatttggagtggaatgtaccaaaatatctcctatgtgaacaatgtattaattaatttggaaaaacaatccccaaaatcattagagctctatgatatttacaaaggagaagcattgggattgcgagctttcatgcatttcgatttattacgtctctttaccgaacagacaaccaataatgacaccaaaggtattgtatacagcacagccttttcagtcaaaccggcagatatcatatccaagaaagacgcattacacagaatcatcagtgaactgcgcgaagcggaacacttgctagacaaccaagagctatacgatcttgcaactgaaaacgatgcctacctgcgtgaccgcaacacacacttcaacctccatgcagcacgagcaaccctcgcccgtgtttatatgaccatcggcaatacagacagtgccagctattatgcagagaaagtaatcaaagaaagcggcctttcactagtaaacaaaacagaaattgctggagatatcatcggaaccctgtctaagaaagagactattttcggagtgtactcgaaagatttctatacgaatacaaaagcagacctttacgatgcaacgacttttacgagccttgatccgagaagaaacattcaacagatatacagcacaacagacggaagtaacgactatcgatatggagcatggtttttacccaccaatgaaggacatcgcttcattaaactgacagataaagtgcaactcgaaaacgggactcgtcctgaaggtcaaattccaggaatcaacctcattcgcttgccagaaatgtactacatcatggcagagtgcctgctctcgcaagacaaagaacaagccatgaaatatttcaatgacgtattaaacagcagaggtctggcttcaacagacgagctaaccctctccatgattacagacgaacgctataaagaattcatcggtgaaggacaaacattcttcaacatgaaacgcctgaatcttgatattgtcaatatcggagaagagactgttccggcaagtaacgccatctatgtcatcaatattcctgaagaagaattcaattacagatactaatcagtaaactatcatgaccatgaaaaaaataatatacaacatcgctcttttaggagcttttctgggtctcttctcttgcagcgagacagattaccctctatttgacgactcggtaatcaacatctatttcaccaacgactcaaccagttattcatttggtatcactcccttgtccgtcacagaacaggtcattgaaatgcccgtaaaaatcatcggagcccctactgatgctgcacgttcattcaaaattgaagttgttccggaaaaaaccaatgcccaagaaaatgtccatttcaaactaccggagacattggaaattgccaaagattccatcaacggcattgtacccataacgcttatacgcgaaaatctggacaccatccactggcaagtaaccgtacgtttggtcgccaacgaccatttcaccccggcatccggagtggatgaaaaaatgggaacagtcggcatcatcaccttcaacaatatcataagcaaacccaattggattgattggcaaggcaaccaaacttggcctgatttcaaattaggtccttggaatccaatcgtatatgtcacattcatggatttcttccatcagttgaaagacaaagcccccatgagttatcaaaaaatggtagaaaaatacggcgaaaatcttgacaatggaaaatatggcggttgggaatgggactacgattacacattgacaaaacacgttttaatacccatgtaccaatattttcaggaacatcctgaattaggagtcactaatttcccgaatcctaacgcataacactttaaatcattctaaatataagaatcatgaaagcattgaaatacatactcattttactctgctccatttcattggcagcctgcttcgatgatgacacaacattagatacggtacgtatctccgaaatcagcattgatactctaaaattgcaaaagacatacaacattgatcacaacgagacacttacgatttcgacaaaagacatcgtaagtgaaagcgaagcccaacttccattgcaatacgcttgggaagtaaactacaaattgtattcagaagaaccagacctgaaatatgtcgggttccaaatcggcacatttccggtacgtttaaaagtaagtaacgaacacggaagcagtttttatgaatttatcatcaacgtaaacacagcctatcaaaccggcatcgccattttaagcgaagacaatgaaggtaatcctatgttttcattcatgcgtgaactaagcgacaatgaacagaataccaatgaaaaaagaaaatttgtaaacaattgcctcgaagtcaataatccagaacatgtattccccaaacatccgaccgacttcggtatccgcaaagaccaaatgttcatcagttttaaagattctcccgccatttacatgttcaatggcagcatgctgaacattgaaaacatcgtcatcgacccagatccagacttcattccggaaagaatcactatgctcaactccgaagcccgaagtgcaacgattctgaccccaagcggcaaagcctacgatttcggttcgattgaaggaatcatcaaaccgcacaccaaattcacttcaacctataacgacaacatcaatcttatcatgtcaacaggatatcaagaagccaccatactttgggacaacgaactccaggctatcgtacatagcaatggttactcattgcaaaacaccaaaaaagaaggacttgatttctctgggcatacacccattgcactttataaaaaagacaaagattatttcactattttgacccaaaaaggaagctcttactttaaaaccaccattgccaacctatggcaagtatatgacaaaacagatgactatggacgacctgtcaatccccacttcggtttggcagaaaaccaaatcgaagttacagggacacaagatttcaccacacaaactccctatgtatccagtatcaaataccaatgtctatattatgctatcggcaacaatatttaccgatggttcttcaacaacagcaattcacttcctacaaaaccgttcgcaactttgaatgaaatcaacggagcagaaatcacagccttgaccatcagtgaagatgaagaacaattatatgtaggagtcaatgaaagtggcaaatcagaacttagcggttcattctatcttttagacagcgacaccggtaaaaaagaaggagattccccctacctgaacatagcacacaaaccaatacgtatcatgtacaaaaaataagaatcatgaacaaactacttatagcattacttgtcctgtgcagctttgcctgccaggacaaaaccatctgcacgttatccggagatattcaaatgggtaaggttagcactttatcctttcaaggttgtgataccaacttcaccatcacaccggacgctaacggacatttcagagtaacaataccaacacaaaaaattcctttctttacacttgcgggagtagttgaagaggaaaacaaatggcaattttcctctcccgtctatctggaagccggagccaatgtatgtatgacaataaattttgtcaatacaacatcagaattctctgtaaaagacaacaataaccaagctctgcaacatttcagggaatattgtcagaaacagaatcggcatttatggacaacaacgccctcgcctgatacagtggaacattttttatccaatttcatagagaaagctcaagaaatcaacacttcctcatccccagataaaaaggtaaaggaatatattgaaaagtgggcaaacatggaatatttaagtgcagtttccaatttaaagttcatctattcacgtatccccaattggacagttcctacaaatttagagttgccgtcagttccacaaacttgtgatattgcctattggaaaatgttctatgactgcccgatgcacgtatcaacctatttaaatcaacaaagcaaagaacctgaagaacaattgcatctactacaagaacagttcaaaaatttagatcttcgtatcgaagtaacaaatcgaatcattgaaaattacttacgcaattatagttattccgatgaaaattactcacgtttagaaaaactgacaacagaacttcctaatcgcgaagaaattctaaaacaatatcgagccaaacgatactccattgtcggagcagaaatgcccgatatcagctttgaagatcaagatggtaacaatcacaaattatctgatttcaaagggaaatatatatatgttgacctatgggcttcttggtgcggtccttgcgtaggcgaagttccccatttgcaaaaactggaaaagaaactaaaaaacaaagatgttgtatttgtaagcatctctctggattcacgacgcccggaatggattcaaaaaatgaaacaactgaaaatgcacggtaaccaatggcgagcaacagataacaccttcgcagaaatgctaaatgtcaaaggtatacctcattttttgatttacgggaaagacggacgattgttagagtacaagactctacgcccttcaaattctatgattgttgaaaaattggaatcacttcactaataataaagacagagttgatttaactctgtctttattattgtattttctctaaaatcatttctatcacaggaacaagaactgcagtcataattcccatcactcctatcgccaaaccactaatagccccttcaatagaacctaactccatagcccgggcagtacccaaaccatgtgcagcagaacctaatgccaatcctcgagcaatacgactctttattcccaaacgctccaatataaaaggtccgacaataccaccgaaaatcccgacaacaattactacaacagctgcaatagaggggataccaccagccttctctgctatactcatagctatcggtgtcgtcacagattttggctccaatgaagcaatcaatgcgtgatcggctccaaaataacgggctatgaatatcacacttacaatacctgtgacacaaccaacaaatacggaggttatgattgaaagggcgttttctttcaaatgctccaactgttcatatagcagatatcccaataccaccacagtagggccaagcataaaactgataatacgactccccctttcaaaagattcatatgtaatccccaatagatgagttcccagggccaataaaggaattgatactaacaatggatgcaaaaaaggcagttttgtctttccataaagccataaagcgaataaataaactcctataacaaaggcaagaataaatatttctgaatttaacaatgtttccatctacaaacaattaacttatcgatcttcagctcccttacgatgtttttcaaaccactgctgtaaagaagcgactacaacaataacaacaatagtacttactgcacaggccacaagcactgcttcccaatatgcagataaaatatctaatgcattaacaataccaactcccgccggcacaaaaaatagccccatattattacataaaaagcctgctacaggcttcaatgtttccggtttgactaattttaaacacaaagccacaaacagcaataccataccgataacactgccaggaataaaaccattgagcaaccaagcggtaagttctcctaaacaataaaacaacaatacaataaagattcccgacaacataatataatcagtaaaaatatcaacaaaaatatagtatctcccctttcgatgtccttgcaacccctatttttcacccaataatcaacggaaacgagtgaattaactatgccgcaaacaaataccggcgccaaaacgtccggcagtcttaccctgacgacgataagaaaaaaaagactctctgctacacacagtacacacttcggccacttctatattagaatcgaccaatccggcttttaataattcatagcggttcacgttccaaagatcaacctgatatttcccctcgcatattcccgcatgcaccatatcaggatatgaagctctaaaaaccgctgcgacctcttcatccacctcaaagcaacatggcccgattgaaggaccaatcgcagccaaaatattcttaggctcacatttccaatgttgttgcatctttgcaacaacttctcccacaatatttgcagctgtacctcgccacccagcatgcgcagcagcaatcacccgccggctgggatcgtaaaacaacaccgggacgcaatcagccgacaacaccatcaaacagactccttcacaatcagtcaccaaagcatctgtattagggaaacgactctcagcactcaaagctccctttccggcatcatctttacctacgacagctacatgagttccatgaacctgatgtcccgtcactaaattattcacctcaaagccgacagcttcagccaataatttacgattataacatattgttgccactgtttgttgctctgaaaaaccgattgtatgatcacctgaagaaataaaatgaataagctccgttctttcagccaaatgttcgaaacgataataactaaataatgaattaccaaccttttgtaacataaacctctgttttttcaatccaacaaaaataagtaaaatccatctcattataagagaataaaaaaagttcttgtttttctttgatgtttattatgaatgaattatctttgccgaccgataatggaatgaataattataaaattttacatacgatgaaaaagggcatacatcctgaaaattacagactggtggcattcaaagatatgtctaacggtactacaacgctgacaaaatctactgcagcaacaaaagaaactatcgaaatcgacggtgttgaatatccattagtaaaattggaaatctctaatacttcacacccattctatactggaaaagtgaaattggtggacactgccggacgtgtggacaagtttatgaaccgttacaaagatcatttggaaaaaagaaagaaataatctttctgccgaataatacaacgccgcctaatctaggcggcgtttttcgtactatattaatgacagacaaaatagtggcacaagatttgccttatatataagatatcataaaagaatacgccattatgacattttgtcataataaaggcaacacatttgataaccattaaaataaaaggatcattaccaatgagcaaaataaatttaaaagtagacctattggaagcattaggagaagaccttgccggcttcatcccagtcattgccgatgaaaaggaactactcaacgaagacataaaaattcctgatacagtacccattcttccattgagaaacacggtattgtttccaggtgttattatccctatcaatatcggacgcaagaaatcgctccaactaattcaagaagccaacaaatgcggtgatttaatcggctgcattgcacaaaaggacacagatattgaagaacctaactttgatgatttatacaaagtgggcacggtagcatctattgtgaaaatcctagaaatgcctaatggcacaacaacagctatcattcaaggaaaaaaacgttttttattggaggatattttatattctgacccttatcacgtcgggaaaatatccctcaaacaagaagaggcaataccggaaaatgacccagaatacaatgcaattgccgagtctttaaaagatatggcctcaaaaattgtacgttattccaatgaaattcccaaagaagccaatatagccttacgacatattgagagcatgctcttcttgattaactttatttcatcgaatacggatgtcccttataaaaacaaacaagaattgttggaaatagacaatcttaagggacgggctctcaaattattggaaattcttagtcagcagctgaatctattggaactcaaaaatgatatccaaaagaaagtgaaaacagatatcgaccagcagcaacgggagtatttcctacatcagcagatgaaaacgatccaggatgaactaggcggaaatcccatcgacgaagaattccaagagcttgaagaccgggctgcacaaaaagagtggaatcaaaacatccgagacctatttgacaaagagctgaataaaatgagacgtctaaacccgcaatcaccagattattcagtacagtcaaattatctacatgaaatgctcgaattgccttggaatcattgttccgaagacaatctcgatttaaatcatgcccaagaaatgttagatgcagaccattttggactggaaaaagtaaaagaaaggatactggaatatttggctgttctcaaattgaaagcagacatgaaatctcctattttatgtctatatggtcctccgggagttggcaaaacctctttaggaaaatctgttgcaaaagccatcaaccgtgaatttgtccgtatgtcattaggaggtctgcatgatgaggctgaaattcgaggacaccgtaagacctatatcggagccatgacaggacgtatcctgcaaaatatcaaaaaagccggaacatctaatcctgtttttattttagatgaaatcgataaagttggtaaagattttcgtggagaccctcaatccgccttattggaagtattagatcctgagcaaaacaacgctttccatgacaattttttggacgttgactacgacttatccaaagttatgttcatagcaacagccaacgacttgagcacaatcgccgcaccattacgcgatcgtatggaaatcattgaggtcagcggatatcttatggaagaaaaacgagaaatcgccaaacgccacctgatacccaaacagttggaaaaccatggaatcactgcagacaacatcatgattccagacgccatcattgaacatatcattgaaaaatacactcgcgaatctggagtacgcaatctagacatgacaattgctaaaatcatgcgacatgttgctagaaaagtggccatgaacaaaaaatatacggtcactttggatgaagccaaagtaaaagaatatttaggaagtcctattttttctcgcgaagaataccaaggtaacgaattaccaggtgttgtgacaggtcttgcctggactgctgtcggaggagaaattctattcatagaatcaagctacagcaaagggaaaggaatccttacacttacgggcaaccttggagatgtaatgaaagaatcagcaacgctcgcattggaatacatcaaatcccatgctgcagagttaggtgttaacgaagaaatattcgatggacatgacattcaccttcatgttccagcaggggcagtccccaaagacggtccttccgccggtattacaatggtaacctcattggtatctgccttaactggcagaaaggtaaaaaaagccattgccatgacaggagaaataactttacgaggtaaagtgctaccggtaggcggaatacgtgaaaaaatattggcagccaaacgagctggtattaaaacaattattctttgttgcgaaaataagaaagacgtagaagaggtaaagaaagaatatttgaaagggcttaaattccactatgttgaccatatcagtgaagtcataaaactcgcattattataatgccattcctataaaaacaatcagacagtaaattactgcctgattgttttatttttctacaagactttgggtcaatttcttcaccaacttatatttattaaaaaactcttttaaaatcacacgtaatacagtataagaaggaattgccaacatcatccccggaattcccgcaatacttcctgccattaacaataccaaaaagatttccaatggatgagcatgaacactatttccgtaaatcaaaggctggtaaacgacattatcaatcaattgtgtaaacaataacacaacagtcattccaaacaacaacggcaacatttcctgataaaacggaagatctaaattcaatgcgacaccgacagtcaggccaaacaaaactccaatcaatggcccaatatatggtattacattcaaaataccggtcaccagacctattacaactgcattattgaaatttagtcctacaatagagagacctattacgttcaataccatcacacctatcacctcaaaaaacaaaccaacaaaataacgtactaacaaattctgtatagaatccaaggcattttttgcctgctcttcatattttgaaggtacaatagccaataccattcctgaaaacaagcgactatctttcaaaaagaaaaaagaaataaaggtaatagaaaacaatgccacaaacaaatcactcactgtacctgccaacgagccaaaccaagttcgcaaacgagcaatattaatccaatcattcaattctttcgaaatatacgcattgacatcctcactctcttccataattccatagtatttcaaaaaatgtccggctttctccacaggttcttgcaactgtgcaacaatattattcacactgacattctccaaagactgaaattcatgcacaaccagcggaataatcgtactaaaaaaaagaataaatacaaaccataaaaaaacgacagtaatagcagctttcacagtatcagaaagtctatattctcgaactttaatcttacccaataaatcaatgattggtttcccaataaaagaaatcacagccgcgactaacacatatacaatcacagtaaaaaaataccatgaaaagaaaaatgtaattgacaaagcaataaaaccgagaatatatttcgtaattgtattcatttttgtatatcttcaccctccaaaaataattaatttagtccgatttcataaaaataatcgtatctttattacgtctatttttaatctaagacccctaaagactatgttcaaacgtatatggtccctatattatgacggcttcagccatttgccccgctgggcaaaaatagtacttgccatcgttgcagccaagttattcatcatgtttgtcgtttttaaaatgctacttatgcctaattacctaaatagccaatatacgacagataaagataaaagtaaccatgtattaaatgaattaatctcaaaaccttaaatatgatgacagaattttctacaacttctttagtggaatggtccagatggcaatttgccatgactgctatttatcactacatgtttgtccctctgacattggggctttcatttttattggcactcatggaaaccatgtgggtcaaaacgggcaaaatcgaatggctgcatgcagaaaaattctggatgaaacttttcgccatcaatttcgccatcggtattgcaaccggcttaatattagaatttcaattcggttccaattggtcaaactactcttggtttgttggtgatatatttggagcgccccttgccatagaagggttatttgctttctttttagaagccaccttctttgccgtcatgtttttcggatggaacaaagtaagcaaacgcttccatcttacctctacttggatggtctttatcggttccaatatttctgcactatggattctggtagccaatgcttggatgcaaaatcctgtcggaatggaattcaatcctctaacagcccgcaacgaaatggtcgacttttgggctgtgctcggctcaccaactgcaatgagtaaatttttccacacagtcacctcagcctatactctttcatcctgtttcgtgataggagtaagcgcatggtttattttgaaaaaaagacacatggagtttgcccgcaaaagcatattattagcatcggtctttggctttttcagtatattagtaaccatgtttaccggagataccagtgcacaagatgtcacccgtacccaacccatgaaattagctgccatggaaggattgaacaaaggcggacacggagcagactttaccatcatcggtatcccgagcgaagaccctgcactggcatccgacaaaatgcgtacagtaaaatacaatctttccgttcccaatatgttatctttcttaggctaccatgattttaatgcttttgtaccaggagtagaagacatactaaacggatatacctcccacgaaggaaaaacatacccatctgtagagcaacgcatggccaatggtcggactgccattgaagcattgcgcacttacaaacaggcagtcgaaaacaaaaacgaggcattagctaatgaatctttgacaacattaaaagcaaactatcaagatttcggctacggctatctgacctctccagacgaagtcattcctcccatatcattagtattctatagtttccgcatcatggtaggattaggaatgttgttcctattgctatttattgtatcctggtggttcgccaagaaacgggaatttggcaaattcaagctcataccttatttagcaatactctgtgttccttgtgcttatattgcttcacaatgtggatggattgtagcagaagttggacgccaaccttgggttgtacaaaatctaatgccaaccagtgtggccatcactcgcatcgcatcaggttgggttgttaccaccttctggatgtttgccgtattattcacattactgctgattgcagaaatcggtatcatgttttcacaaataaaaaaaggacccaagactattgataacgaacaatagacaaaaccaacattaaattttaatatcatggatttaaatatactacaacattattggtggattcttctatgcatattaggtggcttacttgtatttctactatttgtacaaggtggtcagagtctgctgtacacactcggtaaaaccaaagatgaacgggatttaatcgtaaattctctcggtcataaatgggaattcaccttcacaacactagttgtattcggaggggccttttttgccagtttcccattattctactcaacaagctttggaggagcttatgtcgtttggatgctaatcctcttctgctttgtacttcaagcagtgtcatttgaatatcgaagcaagaaaaacaacttcttagggactaaaacatatgaagtttttctaatgataaacggctttgcagcaccgctattgttaggagcagcagtagctactttctataccggctctccattccgcttaggagaaatgaaccgagtagaatggatgacctcttggcgagggttagatgcattattcgtatttaccaactatttacttgcttttgcagtcttcttcttagcacgtacacaagcggctctctacttcattttaaccattaaccatgaagatattcgcaaaagaagccgggcacaagtgctatataatgcagttccatttgtaatattcttcttactattccttggttgtctttttaccagagaaggttatgccattggagcagatggacagatcgaattggtaaaatataaatatttctacaacttaatagaaatgcctgcaaatgcatttatattcttggtaggagttaccggggtactcttcggtatcattcgtaccattttcattcaaacttggcgcaaaggagtctggtatacgggagcaggaacaatccttgcagtctttggattgttaattatcgcaggtctcaataatacggcattttatccatcatcaacagacttaaattcatctttgaccatttataacgcatcctcctctccatacacgctaaaagccatgagctgggtatctttggtcattccatttgtaattgcctatatctggtatgcatggcgttccatgacaaataaaccgatggatacaaaggaactggaagaggctgataataaatactaactataaacaaaacgatgcctatacaagcatcgttttgttatatatcattcgctatttactatcatttatctttttatgcaacccatccaatattgcaataaacattggatttgtcttatcccaaccacattctttcatagcacaaagaatcgatttttcccctttcttgcaatcacgaacagatccttttgcatgcagcattccatttaactgcaacgttgctgtcaatcgctcatcagggttccaacttcttaattcgtcattatacatttttaatgcaccctttaaatcgtcttctgcaaaaaacgaacaaaatgaatctgctgcaataaaaattctttccgcattaaatctgccttttcaactaattttacatactcatccaaaactgctatatctatcggtctatttccaaaaatcatatcattacaatgattacccactaaaggataaatattaccaaataatttgacttcaacctcttcctttccaaccaatttttcataagtcgctttatgttcaaacaaatagatatattctggcaatttcacatcatgaacatattgtttcaatagtagccaattatccatagaacaacgctcctcatcacttagactcttccaataatcatgcaccacgcgatttttatcctctaccatatatgccttggacaaggcttcgacatattgcaagacaaatttaggtgcacgctctccatttttgtagcgatttgccaaagcatacaaagaattctcgccacagcctgtttgcattccttgcaaaaactcgtttgcagattgacctcctacagaacgatgtacaatttctccatctgcagtcaaaatcaaaaaggttggataaacagacacatcatacctttctgccaaaactttaccattacccttctccatatcttgtttatagcaaacaaatttagcattcatatattcacccacatcagatctgctaaatacttctttcatcatttttttacaaggaccacaccaactagtatagcaatccaaaaaaaccaatttattatctgctctagctttttggaacgcttccttcaatgtaccttcttcaaaatttatctgcccatgcacactgtatgaacaaaacagcacgaataagactcctaagataaaacaaacatttttcatgataaacaaactttagtctttactaagtaaatctcttaatatactaacaacttcatcacctcttaaatctcggcgaataatacgtccttgtggatcaattacaaatgaatccggcaaaccacgaagattataggcatccaccattggactttctttcattcctttcaaatcagatagacataaccaagttatagtctccttcttaacatcatgcagccaagcttcccgttctgtatccatcataattgtcaaaaacgtaatattctcatcctttagctgcttatatgctttttgaataaaaggcaattcttttttacaccagctgcaccaagaagcactaaattcaataaaaagatatttcccctcgaaatccgacaaagaatattgcttaccatcttgatcgaacgctttaaaatccgggaatgccatccctggctgcaatcgttgatcatgcattgcgtattccttcaattgtgatacataataagaagattgaaagcatgtgtcaaaacgttctgccaattgtttaatctgtctccctgataaaggtcctgaaaaatgactcacccaataagcaacgaccgcactaattgtcgcatcagttttccactcaaataaccgatccaacatatacaaatacagtgaatcacgcatcggagttaacgagcgcaccgtagccatatctgctttcgcaaaagctaactgaatctgatccgataatctcgaagcctgctgatattcctgtaaattcttcaaaaaccgctccgaggccaaatactcatcatgtaaagaattcccttcaactttcaatgtcccttttacgtcatctacatcacaaacaatcttcatatctgaaggggaaaggaataaattaatcattggaacataagctctttgaggtgtaggagtaatctcaaaagccaacaatcctaattgaggagcatccaacttacttttcaatgaatatttcccagctttaatttcacaactatccaacaataaatttgaaggaggatacgtataaagacgcactatacctccttctaatcctttcacctctccctctattgtcaataatccttgctcacgaacagtacaactacacagcaatattaaatatagaaaaataaatattttcataccaacatttttataagattcctacttcttaaacaaattattgatgcactcaatcatctgttcgcgacgcaaccctttctcttcgatcaatccttccggattaattaaataaatcatcggtataccactcacattataattttgggcaacaggactcttgaatccctgcaaatcagataacaccttccaaggtaaattatgcttttcaacatcatcttcccacttcattctctcatcatccaaattgattgtaaacatgataaaattttcatttttcgtatctttatacacttgctgtaaatacggaatttccaatttacaccatccacaccaggaagcactgaactcaagcaatacatatttaccccggaaatctgacaatttatacgttttcccctctaagtcctgtagagaaaaatcataagccgattgtcctacctgcactcgtttttcagcctccaattcttttctgcaagaaacaacataagcatttgtagacattgaagtatcaaaggcatccaaggctttttcaaacatcttcatattaccagttccaaaatactcttgtacgaaataaggcgcaaccttactggttgaataaccgggcaacgacagaatgtattccatgactttattataagcagtctccactaatggagtcaacgaatcataagcatgacgatcttccttaaaagctttaccacgtatgtaagataaatctccatatttacggaaaatttctttaccgtttttcacaactgatgcatactcttgctgcgttttaccgccttctattacaacatttcttaaatctctaaaatcacccgtcacttttactttttcgttatctaaaaaaaagccgcaagaaccataaaattcctcatcaccattcttaaacacaaagctaacaaatcgtggataatccacctgacctttaaaaacagccttaccatcctttagatcaaatgtgtcaatataccatacagtcggattaggaatcttctgactgacacaaaccgaacaatctgtagcattctttaaattaaacaccacttcaaacccttggggttgttgttggcatgataccaatgccaacaacattacgaccgttaagaaaaaaaatcttttcatatctttataatttattacattacttctccttgatctccaattttataaacaatatccaccacacgaccacatttcccttttatctctgtgccttctactaattgtcctttccctaccacagaaacatccaatatcataaaatcacttttagaagcatctcctgcattctccacagcgacagccaaacgctcataatttgttgcacacaatgcaatctcacgaatttttgttggaaattcacgcaacaaagacactaaattatcttcatgattataaacatataaattcttaccagaagtaaaataggcatatttacgtccagcacacacagcaaattttgtatcctcttgcactaatcctgattccggaaattcaacttctgcaatcgatgaatatgtttttgcactccaacctgcaaatttgaatttttgagcatatatttttctgctatttatatcttggacaaaagtaagaaattcatcttgatacgaatcaatattcatcgcacctccccctatcaacatttttcccatattcgaaggattaaaagccttgacaggatcatttgcataattgaattcacgtattataccaccacgcaataatacataactacaatgctttttatcaaaagccaacacatccgaattaaagaatatattacctcgtattatccagggtaacaattcataatctccactcacaggaaaattagggaaagcaccttcctgatattgtgcattcataccatttggttgttcccgtgtatacaacttaccagcactaatcaaataatcccaattcattacacaagccatactttgaggacaaaaatccgtaggaataccatctacaaattcatccttggtattaatcattttaaaaaaactattaccgtccaactctactgaatatcccggtcctttttggcaagcgacaaatacttgtcccaattctgcagaccaaggtaaccaatgttcacatatagcgtaggctcccgcacttaaatattcattattttgttgataatagacatcttccataaaaacattatcatttctcataaaactcaactgtgatttatcgcccgaatcagacaaaatcaaccagccattcttaaatgcagagctaactgaaactttaaataaggtaatatgacgtactcctgtcttgttatctattatatctaactgagcatacatacctacctttacaggaaaatttgctataacatccaaatccttttttgttgatatcacttctccctccaatttccattcataagaaagatctgatacatccccatttttcacatccacagttataggtatctgaaaaggttctgccacaaaagccgtatactctttatcaggaaccaatcctgtaatctctacctctaatagttggtcataactatagttccctttatcatcgtaacaacttgttactaatactatcgcccaaaaagcaaggcatatattccaaatatttcttttcataatattcatttttcaagatcaaccttttattgcaacagtcatttttgaaccgtcaagttcttctctcggacgtaattccaatgctcttttaaactttaacaccaaaactcgcatttccgaataacttaatgaacctccatctttttctaaagtaaggtcatgaattcctatttcttctataaatgctgtgtatttttcatcggaataagtgcctaaaccactggaaatatgccagtcatcccaccatttaggccaatttaatttgtcagaaataatcactctggctttagagttcgactttaatcccactttaaaatcttctgtgtcaaccaattcaaagactgcctcaactgcatttttctttaaatctcctttttttatagttaaagttaaatatccaacactatcatccgctgcaataatctgtccctgctcactcaaaacaaaatgtgttccctctttcgcactgctttcatccgataaaaaacgtactctaaaagaacgttcacgcgtttctataagcgaaaccatattcaactttaatttcaattcaccttctgtcatcttactatcataagcaaaagaaaatatcgtactatcacttgattcttttgcaaaatatatgtaactatctgaagagtatcctgccaaattatcttccgaacaagcacccaatcctattaatcccagaaaaagaatccaaaagttcttcatatcctatcaaattttaatattgttatttcaaatattcttccacacgtcctccaaactcaatctcagctgacggcatcggcaaactgaaattttgctttgtcaactcaaccgtaccagaccccctgtcaacaggtaatcccaaacgcttgtaccaataaaacatctgaccttcgctaacaaactcacgacgagcctctcctgtcagaatcgtaagtaactgtttaaaagaagcaacacttgttgtttccggaactccacgcatcctttgtaattcgcctaaaaattccaacgcttcaataggattatcctcatagcgtctttcggctgcaattaaaaacatttcggacatacgaatcaaagggaccttaccaccatagtctgattttatatcagcgaacttgtaggaaaccattttttcactaatagaagcatcgcccaccaaattttttctcaaatcatcaggatttggaaataatgcatcaacttctaataattcatagcgagctgaggcagttgcctccttggtataaaacaaattttgtaccccagaaaaatccaatgcaaaaaggacctcattttccatcgttacattcttaagtttggcagtagcacttaattcattttccggagtaaattgaaaacgcccatcatgtacagcatcaatcacctcctttgcataagtataagcctgtttgtctcccatataattgtacacccgtgccattaagccggtaatcgcataataattcatatgaaaagcccgatagtcccaaatagtaggagtacccccagctggctgataataatgataatacatttccttaaagttttcatcaaaaacaggatctatacctttcaacaatcctctcgctgtatccaaatcagataaaattctctttacaacctcatttgttggcaattgcttatgaattttatttgtaaaactatcagcaaatggaatactcataccatctttattatctttccaagaaggagcaaaagcccgcaacatatcaaaatgtacaaaagcccgcactgccattgcctctgctttaattaattggtacttattatcagaaaagaatgccgaccccttttcttccaaatactctaacaatatattgcaatttgcaattgtacgataagaatatagccatatattacgaatcgcatctatagaattcccattttcataattatactttgcggcttcattatatgtatggttagaatttgcataaaccttataatactgcgcaagaacatccataaacccccaagtcatattcataccataagtcgaagaatttgccatagaggtatatacaccgaacagagcattttcaaatccagcctgagttgaaaataatttttcgccattcacctgagcctgaggtgtgacatccaaccaatcattacaaccagttcctgtcaataaagtaattgctataaacaatttggaaaatatctttactttcataattcttaatttttaaatcaacaaacttttagaattggacctgtaaccctacattaaatgaacgagcaaaaggataatccaaaccacgttcacgtttaatattagaaatacggaatacatcttccatcaaaaacaaaactttcaatctttctacatgccatttttttgtcaaacttttggggaaagaataagccaaacttattgatttcatctgtaagatattctcatcctgtaccattctagatgttaattcagtacgtgctttgcttttaatatctttaaaaaatgtatggtctcccggttgttgccacctttcctccaatactctacggtcaacattatagataatatctgcatcttcaacccgatctaccaaagtttggttatagacctgacctccaaactgatataggaaattcacactcacattaaagcctttccaatcggcattcgctccgaatgctcccgaaaatttaggttccgtatcgccacaagcgaccttatcggctgcgctccatttataggtcatattgccgtttttatccaaaaaaacttcacgtccgttagtcgggttgattcccaacgaacgcacagcatatatcgtggttgttgattccccttctttgaattgtacccgaggagaagccgaagtcttgctgtcaccaacattttcatcctgttctttatctacctgctcattcattgccttcaatgaattggacactttttttatttcattaatattgcgcgccatcgttccaaatacactaacgaccaagtcatcccttctcaaagcaaacgcacgtaaagacaattcaaagcctcgattttccaattgccccatattagcacgataagtttcaaaaccatttgatagtggtaaactgatatctgtcaacaaatcttttgtctgtttcaagtaataattggcatttaaactgatcaagctattaaaaaactgcacctcaaaattaaaatcataactattagtcttttcccaggccaaatccttattgccaagagccaacactgaaacccccaatcctccggcataccattgccctttataatattcaaacatatcctgagcttcataagccgagaaagaggccttacccgtctggccagcattagcactgattttcaaatgatttacaacctttttagcaccttcaaaaaaatgttcgttatgaatattccagccaataccagcagaccaaaatggagcatatcgtttctcactaccaaactgagaagaaccatccatacgtccagacaaatcaaacaaatacttattattatatgtatagtttagattcaaaaacatcccgaccaaacgtgaaattccttcttcaccattaggagactcgtctttaaattctttaccaaaagaaacataatccatattgccggcaggaaacccaatcacactataagaatcgtttgagtatttattttgaataagatttcctcccaatgctccattcaaataatgtttacccaattgctggttataagtcaatacaacattcgcatccaaatttgaacttttctgttgaaaattataagcctctccttttttcaaaataccttcaccagactgataatcatatcctccatatctattagaagccggatcaataaacttttcatgctgttctgttttttcagaataagaaacacgccctttcaacctgaaatttgcattaataaaccaatccaagtcaaaattattggtccattccgtatactctgtctcatccttatgattcaaagtcccctcatacaaaggattcagatgtctatatgtagcagccacatattgtggatattcctttatcaaatttccttgctcatcatacactgggaaatacggattagcttttgtaaactcagagaaagagccataaggagattcctttgcctttactttatcaacagataatttattgcggaacagaaacttatccttcaaattataagataacaaaaatcccagacccattctgtctcgtttcgattttttcatcacaccgggatttccttgataactaacatcaataccataacgaatgctttgatctcctccttcaatatacaaagaatgcttatgtccgacagctgtcctcaacggttgagataaccaataagtgtcaactccttttcttacattggctaatcgataagcataatcctgttccaaacgttgttgggtaaacatatcttctgcagtataatagcctgcagcagtttctgcttccaatttttcggcagcattcaacaaatgataatctgacaaatccggagtcgttatagccatattcaagttatacgacactcttaacactccaggctctggagccttagtcgtgacgactaccacgccgttagctgctcgcgaaccatagatagcagttgcggaagcgtcttttaaaatagttacactctctatacggtccatatttaagtcgaaaattttctctacttccacttcgtaaccatccaaaataaaagtaggcaagttagggtcatttttcaaacgcgattcagacaagccttctgctccaaatccagagttaccacgaatacgaaattccggcatactattaggattagaacccatttcaacattttcttgcaaacggaaagaaggatcaaacacctgcaaagcacttatcagattattagaagatacctttgataactcctctttcgtaacaacaactgctgttccggtaaaactatctttattctttgtaaaatacccattaacaacgacttcctccatctccttggcatcctctttcatcactacatttagcgtcttctgtccggtataggcaatttcctgagtttccataccgacaaacgaaaatactaataccacattctctatctgaggcaaatccatcttaaatttaccatcaatatctgttgcaacaccaatagtcgttccttttataaaaatagacactcccggcaaaacacttcccttcttatcttttacaacaccttcaattgtcacattctgttggggaaggctgatgcgtcgattgataacaattacattatcaaccaattcatagcttaactctgtcccttgtaaacaagtctctagaaccttagtgattttttcatctttcacatttaaggtaaccggcttcaaaccgttaatttgctcattgttaaatataaaagtatatttactctgagcctctatcatctttaatacttctgtaacaggtgccttcttggcatgaatacttacagtcccactttgtgcatacgacatggcagacacatgaaaggtagcaatcaaacataaaaataatgttagcttcataacgtttaaaaatttccaggaaatacattgctccggaaaccatcttttcggatttcttttcataaatttgtttttagttcaattaaacatcaattgttcttacgaccgccgagaaggaccagttcccgacggtcatttttatttcgacttataaattttctatcattttctcattcctccaacaatcactgttcgctcagaaatattgaaatacactaatcgagtacgttctaaaaatcgcaacacctctccaattgttgcatgtcgcggaatattacctgtaaaatgtagatctttaacttcctctttctgataaaatacctctacatcataccaacgttttaaaatatccatcacttcttccaaacgtctatccctaaatacaaacttcccttctgtccaagcaatgcgttcatatacatcgacttcttcgattgcaactttacccgcagatactgttgcttcttcaccgggcaacaagtgatactcatgcccatctgcagcaactgcaacagaaccttcaaccaaagtagtacgcatataatcatcgtaataattaatattaaaagaagttcccaatacacatatttccgaatctccgacctctattcgaaaaggcatattcttattgggctgcactttaaaatatgcttctccatgaagtttaactcgcctttcactccctataaaaaccagaggaaattctaattttgaatcagaattcaaccacacttgtgtaccatctgcaagcaataactgatattcaccgccacatggtaccacgactttaccatattcattttctaccgcttttgtctgcaatgaatccacaaactccattaccaatccctcttcgttttctctcatcaccccttgaccaattttttttacaaaacctcctccacgctctcccaacaccaccttttctcctgttccaaactcaatataagcttgacggaaaccaggactaattgtatcttggacctgaaaatctgcaacctgtataactgcatttttattatatacataaaataaacctatagtaaataataaaccagtaaatacggctgcataactcatccaacgcagccacaaccgagtcttattccgcctaattttctgcagaacctgttgccaatctgcctcggcgtccgatgattcataaaatgataatttttcaagcaacaaatgattatcatgcaaacgtttgtacacttctctatttttttcagataaattcaaccatctatctaaatccttctgctcttgttccgacaattctctttccagagatgctttcaaaagttttacattaccttctattttgcgattatccaccatagctactattttatacaaatctttctatcaaatttgtataaataatacaactcagaagctacataggatgacaagaacaactacaaaaatcaaaaaaaatgctaattaaataagagtgctatcaagaataaatcgcccaaacgatattttaatgttctacgagctcttgctttatgggtctttacagtattgacagacacttgcatgacttcggcaatttccaggttatttttcccttccaaatgcatttttacgacttttttctgttcctccggcaaactttgtatttcttgaataaccaagcgatacacctcttcctcaatcacagaagattcaaagtaaaactcttccccgaattttaaatattccctaatatatttttcctccacttttttatttttcaagaagttcagacaacgattgcgtacggtctgatacaaaaacattttcagatgcaattcattctctatactatcccgcgaattccacaacgcaataaaagcttcttgtacaaaatcatgcatcagagcatcatcttttataatccgcaacacccataagcacatagcatgataatacttttcataaaagacttgaaaagcacgttcacttccttgtttaaaagccatgaaacgatctgtatcagctaccataatcatacctatttcaacgagcgaatttaatatatattcctaaatcttacgaaataaaaagctgtcaataatacaaagtgccacaatactttcaatcatacacagataagtgtttgaaaaatagcacattaacaatacaactaacaagcatgcgacaataaaagacatccgccagcaaacaatctgaagttaggaaagtggaaaggaatttcttccctttatcctctatcgaaacctcatatatccccaacttcaatatatgacagccataagacaaagataacagattgttatctttgtcttatatttatcttatatatgacatatagatgtcatatatataatagggaggtaagtgagtacggagaaggcacaaagaaagcgcgatgagggaaaatcatcattgctccacaagtacttgcataaaaaaaatgggggtgtgtcaaaatacacaccttcttttttttatgcacaaagccccaaggctcttgcatttaacttctgagtaatgggtaggcatcccctacccatacaacataatataggcaagattaaacatgactgtaaatcaatattttatattagtattaaaaaatcattttttctcatttttgattgagaaactgtatcagttttgtaaagttcatagacaattctcttaaaattttagcaacacctttttgtttgtccgctactttttttcttctgtttttccatgccgcaataatgttcagtacaattctttgaatcgtgtcaagatttctagccgcctgctctgtttttcgttttattttatcttgcagtaaatttctgtcaagacaccaatgcaagctctcaatactccaatgctgctttgttattttattgaacagtttggcggagcctttcatatttgaaagatacagccgttgttctgaagcaaaggaaccatcggatttcttttctgtagatgtaagtatttctataatagtaaaatcctcgttccatttgttacgatctttgatgtgctcttttcctgagtatattttacatgttcttgtttcaatcctcccatgttccagaacaggtccttctttataagtatcaataggacttgccgtttttatactgtcttcaattccgtagcgtaatgatttttggtttgctttcagctcaatgacataatcacctcctttttgacggattttgtttgttatcgttttttgaaaatacattgcatcggcagtaatgatatttccggcaacctttattttatccaataatttaggggcagcagtgatttcattgcttttcttttggcaaatgtctgttgcaattgtaaatgctgtcttcgtggaaaaggctgatacaatatccggattccgtccgttttcgtatatcgtacctttcatggcttttccgtcgatgcagatgatgtcggctgtatcattggcagtgtccttgtaaaaggcagcggcaaacgcagatgccacattagccatatcttcatggtttattccttgggatacacgacataacgtcgattctgaaggtagtcctttaaagaaaatgccatgagattgaaagcgttttaaatgatgtttaccgaattgaataatgtcagctctggatgtgcatttgctcagacgtgcgattatttcaagcataaggatatcctccagtttgtacttgatgtttcctttgtttgttcttcgatattccggtactgtttttacaaattcttgcaagtgcgctaaaatgcttttgttgaataatttcaagtgtctcttttgttgtaaatagtagcacaaaaacttgtatatcaacaatataaatactatttttgctatagcaaaaataaaggtggtgacaatatcaatgttaaatcgatcttgaaaccacctacaaaaaaaatatttatgaagcaaaagaaacaccacaggcggtgcttctgcatcgtcatgcgcaaatataaagcatttcttgtcaaaacaagttaaatgtgcgggtttttaaatgcaagagccgtgacaaagccccgactttcacaagcaggggctttgtcattacctaaagattcagtatctttacgcataagattttaactatgacaaagatacattatcgtccttacaatcccaagcaaacagtgctttttcctcaaagaattgatgaggatattgcagaaaacgatccggtgcgcatggttgacgccctggttgagagtctgaatcttgaaagtttcagaaagttgtataagaaatgcggccgcagcccttaccatcccaagatgatgctcaaggtcattctataggcctatatgaacaacatctactcctgccggaaaatagaaaatctccttcaccgtgacatccattatatctggcttgccggctatgagaaaccggatttcattaccatcaaccgtttccgtaaccgggtgaagaaggaaatcaatgaggtgtttacccaaaccgtactccttctctcttccaaaggtttcatcagcctgaatgtggaatacattgacgggacaaagattgaatccaaagccaacagatatactttcgtctggcgaaaaacggttgagcataaccgtgaacgcctgatgaagaagatacatgtcctgttagggcagatagacgatgtcattgtccaggaaaagtcatcggaaaacaatgaggaagttgagttcactccggccatgttgactgaaatggcaggagaattgcgccatgcactggaacaagtagccgagccttccacaaaagaggaaaagactgcactaaaaaagaaacgcaaacatctgaaggaactggaagaacacagggacaaactgcaggaatacgacaatcatctggacacgctgcaagagaggaattcctattccaagacggacaaggacggcacttttatgagaatgaaggaggatgccatgcgtaacgggcagacgaagcccggttacaatcttcagatcggcaccgagaaccagttcatcaccgattttgccctcttcccgaaccctacggatacactgaccctgatacctttcctgcaatccttctcaagcaggtatggcaggctgactcatacggtagttgccgattccggttatggttccgaagagaactatcgcttcatgtcagaaaacggcatggaagcctatgtaaagtacaactatttccacatggagcagcggccgagattcaaaccggactcgttcaagtccgaaaacttccactacaatgaggaatatgacttctgcacctgtcctatggggcaaaggatgcagaggataggcatcaggtatgtgaaaaccgcatccggatatgtcagcgaaaatgcccggtacagagctatcaggtgtgaaggctgccccctgaggtgccgttgttttaaagccaaaggaaacaggacgatagaactgaatcacagacttaggaaatacaagcggaaagctaaagagttgctctgctccgaggaagggctgaaacacagagggcagagatgcatagaaccggaagccgtgttcggacaaattaaaaacaacatgaactacaaacgcttccgacattttggaaaggacaaggtcttcatggactttgccttccttgccattgccttcaatataaaaaagatgtgtgcaaaactgacaaaagaaggtatgagctggctgattggatggttttataagcttataactgctgttatcagatacagggaacacataaaccaaagaaatcctcgaattattgcagcataaagaaaatgaaccgatttgtatagtgatgaacaaaaaagaaggtgcatcgtgcattacgacacaccttctttttacataatatcctataaaaaattattccatataactggtattatcccaacaatgggtacacagttcttctttcggcaaacctatagcttctaccaaatcatccaggcgctggaactgtaatgaatccagttgaagatgctgacacatcaccttaaccatctctttatatttttctgaatcagggtcagtatatggttgcaatatctcatcagtcaaatcagaagttccttccaaatcacgaatcacacgacgagcaaataaatcaaacgtagaacgcgatgttgaaaaattcaaaaagcgacaagggaaaatcaatggaggacaagcaatgcgaatatgaacctctttcactccacactcccgcaatttcactacattatccttcaattgtgttccacgtacaatggaatcatccaagaaaacaatcttcgaatcacgagtaaaagcttcattcggcaataatttcatttttgcaaccaaatcacgcattgactgattttgaggcataaaactacgaggccatgtcggagtatattttacaaacggacgcttgtaaggtattcctttctcattggaatatccaatagcatgtcccactccggaatccggaataccagctgcaaaatcaggcatcagtgcatcacgtttagccatggctgctccacaacggtagcgagcatcttctacattaattccttcataataagccgacggataaccataataaacccacaagaaagaacaaatctgtttccgacatcccggagcaataatcggagttataccatccttagaaacacgcacagcttcacccggtcctaaatcacgcacaatagaataccctagattagtgaacgaagaactttcacttgctacaacataaccatattcattctttccgataatcaccggtgtacgaccgaatctatcacgagccgcatatatacaattatctgtcaaaatcaaaaaggaacaagaacctttcactgttcgaaaaacattctctattccttctttaaatgtatcccccttgttaattagaatactcacaacttccgaaggatttatcgtagaagaagacatctctgcaaaatgtatcctttctttgagtaattgtgcagaaatctcttggatattatcaacacgtcccactgttaccaatgaaaaacgccctaaatgagaagtaactgtaatcggctgcgattccatatcgcttatcacacctattccatggtaagaaccggcaaaacgtcctaactcaggttcaaacttattccggaaataagcactttcaatactatgtatcgaacgaacaaaatcttcaccgttaaagaaagccatacccgctttctttgtcccaagatgggaatgatagtctgtgccgtagaaaacatcagcgacacactctttgcgtgaaacgcaaccgaaaaaaccgctcatatcttgttttgtattattttgtactgcaaaagtagtaaaaaatccaagtctaaacatttcattagatttttttataattttgcaccccgttattaaaatagttatttgacatgaaacaacttgattttcatcctgtgctattcagcacattaaaaaactacaacaaagaaaaattccttaccgacttgatggctggcatcattgtcggcattgtagccctccctcttgctattgcattcggtattgcttccggagtcagccccgaacaaggcttgattaccgctattcttgcaggcttcatcatctctttccttggaggaagtagtgtccaaattggtggaccgacaggagcttttatcgtcattgtctatggcattatccaagaatttggaattgaaggactcgccatagctaccgttatggcaggtattatcctattgctgatgggtattttcaaattaggtactatcatccgtttcatcccatatcccatcgttgttggcttcaccagcggtatcgccctaacaatctttaccacacaaataaaagatttattcggtctgaccatggaaagcgttcctgccgactttatctctaaatggggagcatattttcaatatataggcacggttaactggttagctttagctgtcggtatcggtagtatcttactaattatcatcactccaaaattttctaaaaaaatacctggatctcttgttgccatcattgtcatgaccattgtcagctatattatgcgccactattttggtatcacaggccttgaaactatcggcgaccgttttgaaatcaatgccagtctgccacaaccaaatggtcttgatttcagtatgtccaccatccatggacttctacctgccgctttcaccattgcagtattgggagccattgaatcattgctgtctgctactgttgcagatggtgttactggtcacaagcacaactccaacacagaattgattgcacaaggtgcagcaaacctcatcgttcctttctttggcggtatcccggcaacaggtgccattgctcgaacaatgaccaacatcaacaacggaggacgcactcctgttgccggcctgattcatgccgttgtattgttgctgattttattattcctcggaccccttaccaagcacatcccgatggcatgtttggctggcgtattagtcatcgtgtcctataatatgagcgaatggcgcacattcaaagctttaacaagaaattcacattcagatgttgcggtactgattacaaccttcttgctgactgtaatctttgacttgactatcgccatcgaagtcgggctattattggcattggttcttttcatgaaacgtgccagcgaagtaaccaaaatcactgtttcaaaaaatattgtcgacctttcccacgaaggagaaatcactcacgaagaagaaaaactttccattccggaaggcgttgaagtatatgaaattgacggcccgttcttctttggagttgccactaaatttgacgaatgtatgaaatcgttaggcgacaaacctcgaatccgtatcattcgaatgcgcaaagtaccgtttattgatacaacaggtctgcacaacctggaaggtctttatcacttatccgaaaaggaaaaaatcaaagtaatcttatccggtgtcaacgaacaagtacatgctgtattgaaaaaatccggttttgcctcaatgattggtgaaaagaacatttgcagcaacatacacgaagcgttgaaacgcgccaatgaaatataacactattagaatcagtatcctacacaaaaaaggatactgattcatattaaacaataaacaaccgaatcactttaggattcagcacatccatcaagacttcttttcgatatagcttactgtgacttttatttctcgccctaaaaagcttacacacccaacagaattaataaatttacctatctttgccttagattaaatagtaattttcaaaagaccagtcaagcattatgctactaaacattcttcttctatcaggcggactcatcgccttaatctatggagccaattttcttgtagatggcggctctgccttagcacaccggttaaaagtcacccccatggttatcggattgactattgttgcattcggcacctcaacaccagagctagttgtcaatctagtatcctcattagaagggagtgctgcacttgctatcggcaatgttgtcggctcaaacatcttcaacattctagccattttaggtattacagcactcatcgttccgctaggcgtaaaaaaaatgactacttgggtcgaaattccacttgcagttctggccgcagctttaatactgctttttgtctacggagaaaaagacggactcatcacccgcaccgaaggaatttgtctactgatatttttcattatgtttttgatatacacctttgtattagcaaaaacatcctctggaggagaagatgaaaatatacaaatcaaaaattattctattggcaaatcctgcttgcttattctcttaggtctcgccggtctgattgggggcggtcgattactggtgaccaatgccatctctattgcacaagcattcggaatatcggaacgaatcataggtctcaccatcgtatccatcggcacctcgctccccgagttggcaacctccatcattgcagcccgtaaaaataatgcagatatagccattggtaatgttgttggatccaacatattcaatacttttctaattttaggtgcctctgccaccattacaccgttacaagctcctgtcggcagcatgctcgaccttgtaacgaatatcgttgcctctatcttattattcatattcatatttacaggacaaggccgcaaaatcaaccgatgggaaggtgtcatattttttgccatgtatatcgcatacctgatattattgatacggggataatcatctaacatactaaaacaaataaacaattaaatatttctagaacatgaaaaaaagttacatcattctgatagtcattgccgttattattctaagcatctttttttggtttaaaaacacctacaatgggatggtaacgatgcaggaaaacgtatctgcacaatggtcaaatgtagaaaaccaataccagcgccgtctggatttgattcctaatctggtcaacacagtcaaaggctatgccgagcatgaacaaaacacactcaatggagtggtagaagcccgagccaaagcaactcagatgcaaatcaatttagacaatctcgatgaagctaccatgaaaaaattaaatgcagtgcaaggagaattgtccacagccttatccagactgatggcgatatctgaaaactacccagacttgaaagccaacgaaaacttccgcgacctacaagcccaaatagaaggaacagaaaaccgtattgctgtcgagcgtcgtaaattcaataacacagcacgcgcctacaacaccagtatccgccaatttccccaaaatatgctcgcaggaatgttcggtttcacacccaaaccttattttgaagcaaatgccgaagcagaaaatgctcctaaagtagaattctaatcctgcgtatatttttatgtcaccatcaaaatacttcactgaagaacaaaaagaagctatggttgcagcgattcgagaagctgaaaaaaacacctccggagagattcgcatccattttgaaaatcatacccgtaaggaagtgctcgaccgggctgctcaagtttttgccgaactgaaaatgcacaaaacagcactccgcaatggagtgcttatatacattgcattagaagaccgcaaactagccatactcggagatgcaggtattaatgccaaagtatctgccaattattgggatgatatcaaaaatcaattagtatgtgatttcaaacaggggaatgtatgcggaggagtgtgcaaagccgtacactctgtaggtttacaactaaaaaacttcttcccgtatcaaaccgatgatatcaacgaactaccggatgacctctcatttggacaagaaaaataaaacgttcatgaaaagcaaaaatatatttctagctttatggttattgttattttctataactatacaagcgcaagaatttccagatcccctgctccctcgcagaatagtcaacgacttagcaggaatgttctcttcccgtgaagcaaacacactcgaacagaaactccgtcatttcaacgacacatcttccactcaaatagccattgccacagtatcctccctccatggatatgcacccaatgattatgcccaacaacttgcagaaaaatggggtgtcggacaaaaagggaaagacaatggaatattaatactcctaaaacccaaaacaagaagtgaaaaaggacagattgctattgctgtaggatatggtcttgaaggagttataccagatgccattgcctcccgtatcatccgcaacgaaatcatcccagcatttcagcaaggcaattactacaaaggcattgaccgtgcaaccactattctcatgagactcaccggcagtgaatttactgcagagcaatatgcaaataacggtattggtgccggctggattttactgccctttctaatcgtattccttgtacctatatttgtacgccgccgacacggctacaccactggcagccatggaagcaacagtggaagcggcttcccgcccatattttttggaggctttggaggcggaagcagtagcttcggttccttcagtagcggcagtggcaactttggcggcttcggcggcggcagctttggtggcggaggtgccagcggcagttggtaaaatttctataagagcaactaaaattgttgatcccatttagaataagggtattgcgacaaataggagttataatatcttacatcgccggtcacttcttttcctaaccaaaatgggtgtaaaaaatcctcatcttcagcagacaactctacctctgccatcaccaacccctcattttctcctgcaaattcatccacttcaaacacatgtttccctacttttaccaaatgacggaccttctcaatcactccccgctcacataatttcaacaattcattagcttccctaacaggaatttccttttcccactcaaaccgactcatccctcctttatctccaaccccttttatggtaatatatcctcgatctccacgcactctgattctcactgtcctctctggcacagacgacaaatatccctgacaaatacgctctgaggcatacaccccctttttaaaatctccacataccaaaaacttccgttcaatttcctgtcccataactcataaaacattcttactttactaaagagcattaatttcactctcagagagccccgttgcctgggcaattatagaaacggcaactcccaattgcttgaatttcttggcattttcaatattcttcaaccgttctccttctgctctgccttctgcacgaccctctgccctaccttcaatcttcgctgtatccaacacatcattctgaatcatcaccgcattgatatgctcgtcataagcatgacgttctgccggcttcatatcataataacgcaaccgttcccgcgcctccggcaaaccgggtgctgaagcgtcctcactgatttctcctgttttcaaataagaaatccactcctccaagggcgtacgggcaacctgattgaactcattcacacgtatcagataatactccggaaatatttccttgggggatttgcgaacaatgacatcacgctccctggaagtcaccaacaactcatcatgcgtatgcacgcccacaaagcgggaataaccatgatatagataatctcgtccctgaccgatatcaaaataaaggatgctgattgaaatcaccttcttcacctcctgataggagctacccaaagaaatatgctccgtcaccgcctttgccactccatataatatacgctccagataataaatctctcgggtattctgcacctcaatgataataatctctcccttgctgtcctttgccttgatatctacccgattaaacttatcgtccaacgtcaactgattgctttcgctctccagcagttccaaaattgttatcttctcgttcagcaacaccgtcaacaacccctccagcacgctgaaattagccttgtcacgaagcatccgcttcatcgcccagtcgaaatgaatgtatctttccttttccatgactatctgaatattttaaacaaaaataaagaaaatcgcccacatacggatgcttttccctctcaaaccgattcattcctcctttatctccaaccccttttacggcaatacacccctctctccgcactctgattctcacagttctctctaacactgagacatatatccctgacaaatacgctctgagacatacactcccctcttaaaatcgccacactccaaaaacttccgttcaatttcttggcccataactcataaaaactaaagagcattaatttcactctcagagagccctgttgcctgggcaattatagaaacggcaactcccaattgcttgaatttcttggcattttcaatattcttcaaccgttctccttctgcacgaccctctactctaccttctgctctaccttctgctctaccttctgctctgccttctgcacgaccctctgcacgaccctctgccctaccttcaatcttcgctgtatccaacacatcattctgaatcatcaccgcattgatatgctcgtcataagcatgacgttctgccggcttcatatcataataacgcaaccgttctcgcgcctccggcaaaccgggtgctgaagcgtcctcactgatttcccctgttttcaaataagaaatccactcctccaagggcgtacgggcaacctgattaaactcattcacacgtatcagataatactccggaaatatctccttgggggatttgcgaacaatggcatcacgctccctggaagtcaccaacaactcatcatgcgtatgcacgcccacaaagcgggaataaccatgatatagataatctcgtccctgaccgatatcaaaataaagaatgctgattgaaatcaccttcttcacctcctgataagagttgcccaaagaaatatgctccgtcaccgcctttgccacgccatataatatacgctccagataataaatctctcgggtattctgcacctcaatgataataatctcccccttgctgtcctttgccttgatatctacccgattaaacttatcgtccaacgtcaactgattgctttcgctctccaacagttccaaaattgttatcttctcgttcagcaacaccgtcaacaacccctccaacacgctgaaattagccttgtcacgaagcatacgcttcatcgcccagtcaaaatgaatgtatctttccttttccatgactatctgaatattttaaacaaatatagtgaaattcgcctaaacatggaagccttttactacaaatcacctttccataccacaaaatcttcactcataatttctcgacaacaacctgatgctcatcattcaaacggataattccactgaattctcccccggcatcatccttaaatccggataatttaccggtcttacccttcaacaccaacatctccacctgtttttgagtaagttttttcccctgcatctccattggaataaggaaatcacatgatttacggaatagagaacatccccatgccgtttttcctttcaccacctcgccctgcccacacttaggacaaatcaacagaaccggctctgtctcttttttaggcgtgcgctttttcttctcttccttgctattttcctctgcctgctcccgctctttatcctcctctaccgtaatggtctttgccgacgaatattttacgtaatgaacaatctcattgaccatcaccttcaattcttccataaactgccccacctggtaggttccgtcttctatcatacgcagttttttctcccactgtccggtcagctcggcagacttcaataattcgttttgaatcgtatcaatcaactctatacccgttgccgttgccagcagacgttttttatccttacggatataacgcctcttgaaaagcgtctcgatgatatttgcccgagtagaaggacgtccgataccattttccttcattaaatcacgcagttcctcatcttcaacctgtttgccagccgtctccatcgcacgcaacaaatccgcttctgtataatatttaggaggctgtgtctgtttttcctgcaattccggagtatggggtccatgctctcccttttcatacagcggcagaacattttcttcgttttgcttgtcagtattcgtcccgaagactacccgccaagccggtttcacaatctgcttgcctgtcgctttaaaatcctcttcaccaacctttgccatcaccgtagtattggcaatttcgcaatcaggataaaacacagcaataaaacgccttgccaccaaatcgtacacccgtttttcgtccggtgtcatatcataactaaaaacacctgtcgggataatggcatggtggtcggtaatctttttatcattaaacactttcggagacttgcgtattttacccccagtcaaaataggagctgtcagtgcttcataaggtttaagtcctttcaaaattttaggtacctttgcatattggtcgttcggcaaaaaattcgtgtccacacgcggataagtggtcaacttcttttcataaagcgactgtattattctaagggtattttcagccgtaaatgcatatttacggttgcattccacctgtaacaacgtcaagtcgaataatttaggcggatgttccatggcttttttccgctcgacactgataatttccaactccaatggtgcaattttttccattaaagcctcagcctcttccttttggttaaaacgtcccttttgacaagagaaaacaccgccccgatagtttgttctgatttcccaataagtttcaggcttaaaattatcaatcgctttttgtctttcaacaacaagcgccaatgtcggtgtttgcactcgaccgatagaaagtacatttttaccggtaccatattttaatgtgtaggctcgtgtcgcattcattcccagcaaccaatccccgattgcacgggcagaaccagcagcataaagagtgtcaaactcctgagattccatcaaattatcaaagccttcacgaatagcctcctctgtcaacgaggatatccaaagacgctttatcggcacctgacattttgcctttgtcaacacccagcgttgtatcaactctccttcctgcccagcatcaccacagttgataatcatttcggccttgctgaccaattcttcaataacggcaaactgttttttaattccttcatcttcaatcaaacgaattctgaactttgaaggaatcatcggcaatactcccaaattccatcgttgccacttctctgtatattcacccggctcctgcaaagtacagaggtgaccaaatgtccaggtaacacaatatccattcccttccagatacccatttctacgggtattggcccccagaatattcgcaatttccttggctacactcggtttttcggcaatgcacatcttcatatttccaacggcttttatcagtgagacaaaactacggaaaaatcctgaaatattccctcacactttgctctcactcaagatcaccataaaaatatctcaaatacatgacaaagataacaatttgttatctttgatatatagttgtcatatatttgagataaaaatgacttatatttaagtaagagagaaataaaagagaagagagggataattatgagttccctttcttcaatttcagttcataaaggtcgtgacgacgatccaataagttatgaacactgccgtaagtatgtagctcattcaacaaatccagatcaacatccgagaccagaatcatttccgtattaggagtagcctctgcacggcggccatcggtcgggaaggcaaagtcacacggcgtaaacacgcccgactgagcatattggatatccatattatggacacgcggcaagttacccacactgccggcgattacaacaaaacattcattttcaatggctcgtgcctgagcgcacactcttacacgggaataggcattctgtgtgtctgtcaggaacggcacaaaaagaatctgcattccctgttctgccataatacgcgacaattcggggaactctacatcgtagcaaatcaacacacctattttggcacagtcggtatcaaatgtctgcacaagatgcccgccagacaagccccagcttttgatttcatccggagtgacatgaatcttttcgtattgctcaaaagttccatcacgacgaacgagatatccgacattatataatgtaccatcctccaacaacaaaggcatgctaccagtaatgatgttaatattataactgatagccaaattgataaaccgctcgcgtatctgttccgtatactgagccaaagcccggatactctgagcttcgcccaagtggttgaactcagacatcaaaggggcattgaaatattcagggaaaaggataaaatcacttttgtaatcggaaactgcatcaacaaagaattccacctgctcaaacacatcatccaaggtcttatagggacgcatctgccactgcacaatccccacccgtaccgttgtttttttatcaacgatattctccgtgggaggctgataatatatattgtcccactgcaaaagagtggcgcaatgacgagactcttcatcattaggcagatagttcttcattacacgacgaacgtgaaaatcattggagagctgaaaagtcagcaccggatcataaatatcacgcgaacgcaccttttcaatatactccttaggctgcatcttgtcggaatatttgtaataattgggaatccgccctccgaacatgatagccttcagatttaatttttcacacaactccttacgatattcatacattcgccgagccaagcgcaatcctctgtaatcaggatgaataaacacctctatcccgtaaagaatatttcccttgggattatgagtagaaaaagtttcattgccggtcactttggcatacgtatgatcacctttcactaaatcataatcgacaataatagaaagagcacaacctacaatcttattgttcacaacggtcacgatctgtccttccgggaaaatctgtatcaactttttgatttgctggtgtgtccaaaacacatccttgtccgcatatactctggtaaacgactgggcaagctgagcatagtcatccatgtggagtttacgcacttccactttactaatcttctgcattggttccatcatttcatataataaatctgtcgcaaaggtacagaaaataacccaaaacaaataaaattcgtatctttgtcaaaatttacctatatccaacgatatggcaggaattaaaagcttggcaaaagatacagccatttacggcttgagcagcatcatcgggaaattcttgaactggtgtctgaccccactttatacctatcttctgatgccggaagaatatggcattattgtcaatctgtatgcttggattggcctgatgctggttttactcacatatggattggaaaccggatttttccgttttgccaatgacccggacaaaggagacccgcaaaccgtgtatgctacgtgcatgacctctttgggtatcactacctccctgtttctcggactggtattcggattcttaactccgttgtctaatctgcttcaaagtggagcacatccggaatatgttgccctaatcgccattattattgcattggatgttttcagtgcccttccttttgcctatctgcgctaccgtttacggcctttgcgctttgctgctctaaaacttttaaatatcggactgacaattattttcaatattttctttttagtcgtctgtcccaaaatccatattaaccatacagaatggattagctggttctataatccggattacggtgttggctacatccttgtttcaaacgtacttacctccggcattatcctattgatgctcctgcccgaaattgtccgcatcagatggcagtttcaatttcaactgctacgacaaattctgcattattcatttccattgctgattctcgggctggcaggaatgcttaaccaaaacttcgacaaaattctttacacctacctgattccggatgcagctgaggcttcacaccaattaggtatttacggtgccaacgcaaaaattgccgtagtcatgattatgtttacccaagcattcagatatgcctacgaaccctttatctttgcccgtaccaaaggcgaagacaaacgggcaacttacgctttggctatgaaatactttatcattgtcgatttgctgatatttcttggtgtcatgttctatttggacattatccgttattttatagatccgcgatattttgaaggcctaaaagtggtgcctattattatgatggcagaattattttccggcatttttttcaatttgtcattatggtataaactgacagaccggacacaatggggtgtttatttttctcttatcggcctggtaatcattgtgactgccaatattatattcgtacccatgttcggttatgtcgcttgtgcctgggctgcatttgcatgttattttgccatgatgttcttttcatggctcataggtcagaaatattatcctatcaactacgatttaaaggccattgccaaatatacgggattggcattgattctgtatttcatcggcacatgggtcaatatcgacaatctcattttacgcctgatattccgaaccggtctgctcgcaatttatctggtctatttaataaaaaaagatttaccattaaacgaaattccaattctaaaccgtatttttcgtaaacgcatctaatccataataatattttatatccaatcaattatggcactaacagatattatcgtacaagccaaaaattacttaaacagtatttttgacccttctgaagagagagagaatgaagcagaaaccattgaaaatattcttaaaggtattaatttccgagggagcaacctttgggtgttgatttttgccatttttatcgcctctttggggctgaacgttaattcaacagctgtcattatcggagccatgttaatctctcctttgatgggtcccatcatgggcattggattaggtattggcatcaacgattttgaactcatcaagaaagcctttagaaatctggcaattgccactatctttggaatacttacctctaccctctattttttaatctcacctctcaacgaggcccgctccgaactgttggcaagaaccaccccgactatttatgatgtcttgatagcattctttggcggtttggccggaatcgtggcttccagtacaaagctaaaaggtaatgtcatccccggagtagccattgcgactgcccttatgcctcctctttgtacggcaggtttcggcattgccagcggaaacttcacctattttttcggggctttctatctttatatgataaattctgtgttcatcgcttttgcgacaacactaggagtaaagctcatgcactttaaaaagaaagtatttgtagataaagcacgcgagaaacgagtacaacaaatcgtttatgccatattgattgttacgatggttcctagcgtacacattacctacatcatgatcaagaaaaatatttttgaaaacaatgccgcccgttttatcagcaatgaaatcaaataccccaacacatttattgtcaataaaagtatccacgaagacagcattgccgttactctgatcggaaaagaaattccggacgactatatcggtatgcttcatcagaaattggcacactaccatctggaaggatgcaaattacatattgaacagggaatcaatagaaataaagaggagcaacaaacagatgaactgagcaagcttgttctacaagatttctacaaacaaagccgccagcaggctcagcgacaagaagcagaaatcatccggctgcaaaagcaattgaataattatgtcagctatgattcgctaagcaaagcgattgttccagagatacaggtgctcttcccggacatcagcagcattgccttatcgcaaatcatacgcaatcatataacaggaagtacaagcgacactctatctgttgcaattttacgataccaacacaaggcgcaaaaagccaaaacggaacaactccatcaatggctatctacacgcctgcatgtcaaacctgaaaaattaatccttttgaaggaagattagcagagaggctacttacgagcctcccatttcatttcttcaataccctcatcgtgagcaatcttacgtgaaagcatgaaaagataatctgacaagcgattgatgtatttcaacaacaactcgtccacgtcagattgtgcagataagtcaagaatacgacgctcagcccttcgacaaatggtccgagccaaatggcagaaagagaccgcttgactatcaccacctggcaacacaaatgctctcatgggaggaacatctgcatccatacgatcaatagcctgctccaacataataatatcttcctcccgaatacatacttttacatgtaaatcggatgggtctgtcgctaaatttcccccaacatcaaacaagcgacgttgtatttcaaccaactcttctgccaatggtgcgttcaacttgcatgaacgtacgattccgatgcaactattcaattcatcaacagtgccatatgcttccaagcgtgcactatttttaggcactctttgacctccaactaacgaagtcgtacctttatctcctgtttttgtataaattttcataatacattaaaccattaaatattaaataatcaaccgatatttccccttttgaattttgtggtcaaagaatagcagaccataccacatcatatctaccgaaaccgtggccttttcattcaactgacgccataaacgagcatgccgggcatctttgtatatatctgtaattacaatatatttaggataatcctttatccactcctcatcattaaaaagatttatagtggctaaggtccgacgtccgatatagacgaaatcagcatccgacactctatccggaacatcactgacatctgcttcctgatataccattgaaagatagcttgccagtaaagaagaattcaaacccagacaaacaatcttatgaacacgcaaatggcgaattaagcgcgccaacagacgaaaaactttccgttcctttcgattcaaaatattagcctgttccaattccaccggataggaaaactgttttccccggtcgcgaatcacattcaatatcagattgaacataaaaggcgaatgcacaccataacctcttttatgtctaaagcgtattgcatgtttgagtctttccttcagataccccattgcaaaaatcgttattaacaaagcaaatttaaacaattaaccgtatatttgaatcgttattgtataaagatttggaactatccggtttaaatatcaagtttctacctggcgttggagaaaaaaaagccgcagtactattagcagaactggggatagagagctatgaagatatgctttaccatgtgccctataaatatatagaccgaagtaaaatatataaaatttcagagcttaacagccatcttccatacattcaaatcaaagcaaagatctgtgacctgcaaacagtaggttcaggcagcagtcagcggatgacggctactgcatatgacagcagcggttcattgaaattggtttggttcaaaggatttaaatatttagccaatcaactggatgcaaaccaagaatacctaattttcggacaaccttcattattcaacaaccaattaaatattgtacatccggaaatagacaactttgaaaaggtctctcaattattggtgggttttcaagccatctaccagacaactgaaaaaatgaaaaaagcgttcttgaattctaaggctataagcaaaattcaagcaactatcttcaaaactcttaaaatcaaaattccagagactctcccatcgtggtttattcaacagtataagctgctatacttacacgaagctctatacaatattcatttccctgaatctccagaaatgttacgcaaagctctctatcgccttaaattcgaagagcttttctacattcaactgaatatactgaaactaaaatacaaacgaaagacagctttcaaagggcatgtattcacaacgataggtgattacttcaacacattttacaaacaatacattcccttcgacctcacaaatgctcaaaaacgtgtaatcaaagaaatcagacaagattgcggttctgggaaacaaatgaaccgactgttacaaggagatgtcggtagcggtaaaacattggtagcaataatgtgtatgctaatggcattggataattgctatcaaacatgcctcatggcaccaacagaaattcttgccacccagcactacgaaacagtcagcaacatgctacacgaattaggcatctctgtggccttgttaacaggatctacccgaaaaaaagaacgtgaaacaattcatcaaggactacaggatggttcattacagattcttattgggacacatgccttactagaagatgtcgttactttcaaaaatatcggacttgtcattattgacgagcaacatcgctttggtgttgcccaacgggctaaactatggcaaaaaaacagcattcctccccatgtcttggtcatgacagccacaccaataccacgaactctagctatgacactttatggagatttggatgtatctgtcatagacgaattacctccgggacgcaagcctatcaccaccttgcacacatatgataaaaaacgattggatgttttccgttttatcgaaaaagaattggataaaggaagacaggcttacgtagtatatccgttgatttcagaatctgaaaaatttgactttcgagatctggaagccggattcgaacaaattaacaactactttctaccgaaaggatacaaaaccggcatggtgcatggcaaactgaaaccagcagagaaagacgctgaaatgcgtcgttttgcaacagcagaaaccaagattttagtagcaacgacagtcattgaagtgggggtaaacgtccccaatgcttccataatggttattgaaagtgctgagcgattcggactctcccaactacaccaactacgaggaagagtaggacgtggcgcagaccaatcctattgtatattaatgacatcctataagatttccaatgattcaaggaaacggattgaaacaatgacatctacaaatgacggatttgaaatagcagaagcagacctaaaactccgaggaccaggcgacatagaagggactcaacaaagtggacttacttgtagtttgaaagttgcaaaccttggtaaagatgccatcattctcaacgaagcctcacgtgctgcaaatgagattctagaaaaggatccgaacttacagaatactgacaaccaagtttttgcttcacaaatcaaacgtctgttcaagaccagaatcacttggcgctacatcagctaaaaagagctgaaaacaatatagtcttcagctctctacatattttcaaggcaatttttatttaacagccaaaccttttacttcaccattcatttgataccattgtccttcttccgggaaatatctgaaatttaccttttcgtcagaatccttagcagcaacagtcatgttattttttgtttttattacttggtacattttaccattgtgcataacatcctgtgtttcaacttcaccatctttcatagagataggattatttccactccaaaattcaattgagttaaatatcaatgcatcacctaaaagacaaagttcataagccggcaaaatacaaaatcctaaaaataccaattcatttacaaacttcttgttagaaacttgtccattccaattatgcaattttgtagataaacggaaagggccataacatcctgtcaaagatggtacagatgcaactaaaagtgctactgccaatacttttgtcaatgtttttttcatgagttcgatttttaatataatatatatgcaatattagtataaataagttaaacagcaaagaaaaactccgactattttaagtcggagttttaacttattgtcaattatgcttcttatttcttgatatagaatttatgaggcttaatcatattttcaggcttcaacaattcatccaattcttctttagttaacatgccttcttccaataccaaatcataaacgctacgattttctttcaatgcacgtttagcaatgcgtgaagaattttcataacctaaagtcgggttcaacgcagtaacgataccgatgctattcaataccatagtacggcagcggtcaacatttacagtaatgccctctacgcacaatgtacgtaaacggtccatacctttctgcaacatcttgattgagctgaaaatagaatcaaccaatactggttccattacattcaactgcaactgaccagcttcagctgcgaaagttactgtcaaatcattaccgataacgcggaagcaaatctgattaacgacctcagggataacaggatttaccttacccggcatgatagaagaacccggctgcataggaggcaagttgatttcactcaatccacaacgaggaccgcttgataacaaacgcaagtcgctacaaatcttagataatttcactgccatacgtttcaatgcagaagaatacataacagcagaaccagcatccggagtagcttcaatcaagtttgacgccaaaacaaattcctcaccactgatgatacgcagattcttaatacattttgctgaatactctggttcagagttgattccagtaccgattgcagtagcacccatgtttacttccaagaacaattttgcattctggttcaaacggtcaacctcttcttccaagttagcagcaaaagcttcaaattcttgtccaacagtcataggaacagcatcctgcaactgggttcgtcccattttgatgatttctttgaattcttctcctttagcacggaaagcctgaatcaataattttaagtcagcaaccaactcctcgttcatgaagataaaggccaatttaaatgcagtaggatatgcatcattggttgactgcgacatatttacatgattattcgggtgacaatactgatattcacctttttcatgtcctaaaatttccaatgcgcggttagccaccacctcattgatattcatattggtagatgtacctgcaccaccctgaatcaagtcaacagggaactgatcgtgcagtttgccactgataatttcttcgcaagcacgggtaatagcgtcagcaatatcatcaggaagaattcccaactcttggtttgcttttgcagcagcccattttaccatagccaatgcttttacatagttaggataatggctaatagtcaatccactgatattgtgaaagttttcaataccacgaagcgtctgaattccataatatgcttctgccggcacttctttttcgcctaataaatcgtgttcaatacgtgttttcatatattcagtcttttagttattgttttcgtttccgaaaggcaccacaaagttaaataataaaaaatcattatgcctaactttctctcaaagaaaaaaaacattcacatagtttgaaaatgatgtaatacaaacgtttacgaaaatctgaagaatatttaacactgtaatattcctcaaatatgatttttcacagctttttacggattctttttcatctaaatttttattggaggccaccataaaaagacctccaataaaatatttatacttcttttgtgtcaacatcgaccacgtcttcacaaacatcatccgctacagtaacctgccccaatggggacaaattctccggaatctgttcctcttcttcatcaaaataaggatatacatccataaattgagtatctgttatactggcaatttcatacggcacaacaaaagttgacaaacttttctccaaattctccaatgcccggttaatgttggatgcagccactagataatactgaaaagaagacttttctttaccgctaacctcatcagcatctataatgcctactttcgccttgtaccaacggtcatcattttcatcgtccgacggcactaattctgtaatattcgatttttttaaactacttatgtaataatctccggaaatcacagactccatttcatgcgtaattctactctcggcttcagtatatgacattgcatctaaaagataagcctcatttacctttttactcttcccatcctcattcaccttcatatacttcaccttcgcttcaaaccaatttgctgtcatccttcttatttatttctgtttatacgatagtatcctctattaagcttgccctcttggatcaagatccaacgggaatactgcatcagcagaatcatttgctgcgatacggattattccattatcctgctcaaattttctaatgttgtcttgtaaagtcaacattaaacgcttcatattttcaggcgtcataataattctactcttcacttccggttttggaactccaggcatcaaccgcacaaaatccacaataaattcagaagaagagtgagcaacgattgcaagatttgcatatgtcccttgtgccacttcccgactcagatcaatctcaaattgctggtgtttctgttcgtccataacctacttatttattcattaaatgtttttgccatttccatgcattagccaaagtctcttcaataggcacaattgctttccaacccaactcattatttgccaaagtcgtgtcagcccatactttttctatatcaccagcacggcggcccacaatcttataattcactttttctccggtcgcccgctcaaatgcatgaatcaactccaacaccgatactccatttccggtgccaatattaaaatattcataattagtcgcatttttaccatccaaaagacgacgaatagccaccacatgagctctagctaaatctactacgtctatatagtcacgaatagctgaaccatcaggagtattataatcatcaccaaacacgcttaactgctcacgaataccagcaactgtttgtgtcaaatatggaattaaattgtttggcacaccattcggcaactctccgatacaagcagatggatgagcacctatcgggttaaaataacgtaaagctaaaagattcatctccttttcaaccttagctacatcacgcataatatcctcacacattgctttcgtattaccataaggagattctgcctgtttgcgtggagtctgttctgtaaccggcaaaacgtctgcttgcccatagacagtacaagaagaggaaaataccaaattttttacaccaaacactcgcatacttgcaatcacattcatcagtgaattcaagttattacggtaatactccaatggcttctgcacagattcacctacagctttcaacgcagcaaagtgaataacagcaacaatatcctgatgccgtgaaaaaaaatcttgcaccttagcagcatcagccagatcaatttgttcaaattcaggacgtattcctgtaatttgttctataccatccagcactttaatatttgaattgcaaagattatctgcaatcacaacctcaaaaccattctgctgtaattcaacaacagtatgcgaaccgatatagccggtaccgcctgttacaaataccttcataaggaatcagatttatattatttactttgaattgatgcaaagtaaataataaattagcaaaattcacagcgctagtaatgtgaaaaaacagataattttctttttacaagagattggattcccaagtttttttcatacttttgctgcatgcatagattcattgaatacatatctgaccttttgtttttgcacgattgtgtgataattcctgactttggaggttttatctgcaattatacaagtgcatatatagataaaaaaagtgggttactctgccctccaggtaaagatatcttatttaatcgcaatctgacacagaacgatggtctgcttgcaaattggatttcaatgaaagaaaatatcagctatgaaaaagcaacaactcaattaacgcttttctctgaagagttaaaaatacgcttgaaccaacgtcaacgtgtagattttggtgatattggaagtttttatacagatcgccgattcaatattattttcgaaaacgggaaacataattttttctcggaagcattgggtatggctcccatatccatacaatctatcagtaagactaatactaatcctgtacaaattagtatgactccggcttcctctccggaaatggttgcctacacacatcacgaaacgattggaaacttttttcaacgtctactgaaatatggtcttgcagtagcaactattacaggagttgttgtcgtttcacaattaaacattttccataatgaatccggcctattgagaggaaaattaaaaaacgatacagcacttcgcccagagcttcccacaaaacaaaaccataaaaaaaacatcacccatcataatgtcatttctccagcatccgactatgtgaaatataatcctatggatgattttactttataagtaaagcgaatagtgaaaaaagaatataaagaggcactattaagaaaacaacagcccatcccaaaatacaaatacaaataaccaaagagaccaaataagcataacgaatcttattttctacccaacctaagcctgatattttcaacgaaaacatcggcaactcgctaacaagcaatatagacaagatcaaagcacaaaaccccaacaccgctacgttaccaaacaacacatgatacaatgtcggagcacaagaatatccaaataccaacccaccccaaaacaaagcattagcaggagtaggcattccaataaaagaagtcgtttgacgaatatccaaattaaatttagccaaacggtatgcggaaaaagcaggaatcaataatggtgtacatatcatcaactgttcccacaatctccattcaaagaaatgctccatactctctcccggcaaagttttaagcattaaaaaatgtgccaaaacagctggagccaccccaaaactcaccacatccgccaatgaatccaactctttcccaatatcagactttacatgtaataaacgagctgtcatcccatcaaaaaaatcaaaaatcatcccaagcaatatactgccggcagccaatgtcaaatgtccatacattgccataaaaatagctaaagtcccagatataacattcatagaagttatcaggtttggaatatgttttttcatatcgctgtttttaaagagatttattggcaaatatataaataattcccattagtattagtaatccctgatataatggcaatcaatcataccactcagtctttatcttgagcatcatacttattcataataatataaaactcagtacctactcccaatgttgttgtaaatcctatctcgcctccaaaattttctataattctacgacaaattgccaagcctaaaccggagccgcttgattttgttgtgaaattcggttcaaaaatctttttctgaatatcttcaggaattccacaaccattgtcttttatacgtatttccacctgatcccctattccttttaatgtaatccaaacttctccttgccgctcaacaggaatactttgctctgcatttttcaacaaattcacaatcacacgacgcatctgttctctatcggcatatacattcaaattagattcagcatcataatgaattgtagctatcgcattttcaaataataaagaacaattccttagtacttcatccaacttcaaaacctcgttatgtgtaactgacatttttgcaaaatcagaaaacgtagatgcagtagctgccatattatcaatctgctccatcagcatagcagacaaatctttaaaacgctgcttaaacttctccgtatcctccatctgcaaagaacgcaacataaattggatattcaatttcatgggagtcaatggattcttaatttcatgcgcaatttgtcgagccatctctctccaagcactctctcgttcagttcgagccaattgactgatactttcttccagcttatccaccatattattatattcttgcaccaacacccctaattcatccttatccttataagatatcttctcattcttccctcctattcgcatcttacgcaatttatcgttcaccaatttcaacggtttagtcactctctctgccaacaatccggaaaggacaaaagccacaaccatcataataatcgctatattcaccgttatcacaatcataataatgatatccagattcaattcatcattctgagcaaagtaaggaacatttaaaatgtaagtttttccattatccaacaccaagggcatataagctgccatataattcaattctccaatatcttctctttctatataactggtggctccttgcttatttattgcttgcaaagcccgaggatttatcaaagatccacggaaatccaattcaaaaatatctggtcgcgaagtagcaaccaattctccatccaatgaatagatattaatatcaatcatcaacaactccgacatattagataaagtattgacaatatcaggacattgcatcctatctacacaatctaattgctccaattccctattcacatatttcaaaaactcgatagccttcgctttatgccgtccttcaaaactctttgtattaataaaaatacttaaagcagtcagcaataccagcaacaagaaaatcaaagaaataacactattcttaatacgagcctttaacgtccccttgctgaaagccgaattattattgaagttaaaaaacaatccataagaagcgagcagcatacacaccaggaaagtataaagcgcattcatgtaatacaatgcaaacattctttccggcaaactgataatcagagtattgtaatcatccaccgctaccaacatatgagaataataatctttatccaccattaatacgcctgtacctttgttaccaccccaatgcttcagttttttcccataaacaaattctccactggaagaaaccaactctcctttcaaatattttgcatacgaataagtatataccgggtcattaacaatacctgatttcctggacaatatttgaggatatccaattccaccttcatctttctctgcatcgaaacgcaaaaacaaatccacatcaccaaaatggaaacggccgatataagtcacaaaaccgtcaaatacacgaatagcataaaaatttgtctgtcccagacggtatcctgcactctttataatttgatcaaaataggctctacagtcacactgattccccttatcagctaacaccaaacgatccccctctctgcaaaacgtgatatctgaataataattatatcccttcatatccaacaaattggtctgtaaaaacatctctgcctgtacatcatttcccaattccgcccaaaaagccaacacagtagaagaacaaatcgtatgattcaattccacaagatacttctcaaaattataatccctctcttctatcaattccgtagcatattccaaacgctggcgttgctccttataatgctcatactttttagttatcatcacaatataaactgacaacaaaaaaatacccaacatatagacactttgttgaatatcacgttttaataaatacttgttggcagtcactatcattgtgataccccaaataaaaaaacaatcccaaaaattagtgtacaactccaacaaatcactcacaccccacaataccagacacacaagagttgtaatcctcatcatacttttaaaagagagaaaatggtgcaaaaaaaacacactgccaaatataccatacagaatcacaagtcctcccaagctgatggctataaaagcaatgatggaagccactccgacatgaatcaactgagcgacattcaaatgcacactcatattggcaaccactaaatctatggcaaaattataaaaatcaacatataaaaatatagcaaataaaagcagacaagctatcaaatatctataacgcctgaaaagttcatttccataattaatcttgatattataaaaggttatgtatatcacattgaaaatacaaaatgtcgataacagcaaatctcctatagaagtcaccaaaagaccttcagatacatgatccataaatataggtaaacggtatatacaggaaggtatttcataatgtagcataaaaccacggatactccccaataataccacaaacccgacaaatatcaataattgttttttccatgacaccgtcactttcaacaatgcatcatacacatgaaacaaacacaaaaaagaaatcaaatacaaaataatcaaaacataattagccccctgctctttataagccttatcatatatcaatgaaaatagcggcactttattattatcccgaatcagatgtgctccagcaactcccgccggtaaaatctccactaacgaagcattttcctctgctatcttcaaaaaacttccaaacttatcttttacatacttactattatatggataagcatctttaatacgtaacagcgcaaaataatcttggacattataacatttatgcctgacttcataataagtattacctaatttcacaaaattaccactctgcgtcaacaaccggtaaagttctttatcccccatcaactcatccgtccaaaaaaacagtttaccttcatgaaaacccaaaaaaataacatctttttcacaatcttcctgctctatctgcacactatcccggaacgatttcaatatatcatccgcccatttttcctgtttatgtaggcgattctcaaaattctgaacccacaccgcttcgtcctgacgataaaacagatactccgtcaagccggttgcccccaataaaatacaggcaaaaaacaatactattaacgctctttttttcataatttactcgtgatgatacggctcacccttcaatattgtcatggctcgataaatctgttcggcaaaaatcatccttaccatttgatgcgaaaacgtcatcttggacaacgatatcttatcattagcccttttataaaccccatcggaaaaaccataaggtcctcccaccacaaacaccagccgcttaacagtacccaacatcttctgtgccagaaactgcgaaaattccatcgaagaatattgccgtcctctttcatccagcaacacgacaaaatctcccagctggaactgctccaacaacatttcaccttcccgctccttttgcagactttccgtcaaattctttgcattcttcacatccggcaacaccttcatttcgtaaggaatatagcgggtcaaccgcttttcatactctgcaattccctcccgaatataagaggcatccgtttttcctatgactaataagcacactttcatggttcatattcatttatatccaacgaaaataatattttttcttcaaatcatttgtaaaaactcagattttatccctatatttgcacccgttaaaggaaacacatcctgaaacgcacactagtgcaggtcccatagctcagttggttagagcacctgactcataatcagggagtccttggttcaagcccaagtgggaccacaagagcaaccttatcggttgctcttttttattctaacaaagttttgttacacttatattccccgatcatgtaacaaacatcatcattctcaacttttttttgtaccttagtccggcaaaaaaatcaacggaacaatatgaatctaaaagacgaatttcaacaatatgccttacataacagaggcatcagcagtttgaatcttcatcgctatcaggctgccaccaatagttacatcactcctaacattatcgaagagcgacaactgaatattgccaccatggacgtattttcccgcttgatgatggatcgcgttatctttttgggtgtacccattgatgacgatgtagccaacatcatcatggcacagttgctgtttctggagacctccgatcccggtcgcgatatccagctctatttcaacagcccgggcggttccatctatgccggtctgggtatctatgacaccatgcagttcatcaactgcgatgttgccactatctgtaccggtctcgcagcctccatggcagccgtactgatgtgtgcaggaacacagggcaaacgctcggcattgaaacattcacgcatcatgatccaccaaccgatgagcggcgtgcagggacaggcttccgacattgaaatcacttcccgggaagtactgaaactgaaaaaagaactttacaccattatatccgagcactccggacagccgttcaagaaagtggaaaaggattctgaccgcgactattggatgactgccgaagaggcgaaagaatacggtatgattgacaccatattggtgagaaataaaaaacaataacacatgcaagataaatgttcattttgcggacgcacccgcaacgaagtaaacctattgatagccggcaccgacggatttatctgcgatgactgtgccacccaggcgtatgacatcgtacaggaagagatgcgcggaaaatccaatctcaacctggataacctagaggtaaagaagccgattgaaatcaaatccttcctcgaccaatatgtcattggtcaggacgaagccaaaaaacacctggcagtagccgtctataaccactataaacgtctgctccacaaaccgggcaaagacgatgtagaaattgaaaaatcaaacatcgtcatggtaggacgtaccggaacgggcaaaaccctgctggctcgtaccatagccaaaatgctgcacgtacccttcaccatcgttgacgcgactgtgctgaccgaagccggatacgtaggcgaggatatcgaatccatactgacccgcctgcttcaagctgccgactatgatgtggaagcagcagaaaaaggtatcgtatttattgacgagctggataaaattgcccgcaaaggcgacaatccctccatcacccgagatgtcagtggcgagggtgtacaacaaggattgctgaaactgttggaaggctccatcgtaaatgttcctccacagggcggacgcaaacatcccgaccaaaaaatgattcccgtcaataccaaaaatatcctcttcatctgcggaggagcgtttgatggcatcgaaaagaaaatcgcagcccgtatgaactccatggttgtcggtttccatgccagccaggccatcgaaaaaatcgaccgggaaaacttcctgcaatatatcgctccgcaagacctcaagtcgttcggactgataccggaaattatcggtcgtctgccggtgctcacctacttggagccattggaccgtcaggctttgcgcaacattctgacagaaccgaaaaatgctatcatccgtcaatatatcaaactcttcgagttggataatatcacactcaaatttgatgaagaagtttatgaatatatcgtagacaaagccattgaattcaaattgggagcccgcggattacgttccatctgtgaagccatcatgacagacctgatgtttgaagtgccctcgcaagacaagaaagaaattacagtaaccaaggcttacgcagaagaaaaactaagccatgtacacgcccaaaaactacgggcataaaaaagaatatgatttacgattgagcaatcaatcgtaaatcataaactaaaaacattttaaatattcatattcgccaaaagactgtaaggaattttagtcaatccctccgccatctggttaatacctttttccaatttacctttcaacaacattttcatcaccatattcaactcgccttgaaaagtaattttcatacgggtatcgtaaggagcattttccaacaactgaatccagatattgaattcgaaaggcagcactccgcctccacccagtttaatcaatttcggctcctcacgttccacgatattcacaaccacatcgcccaggccttttactgtgatgtgacaagcatcctctacaaaacttacattttctatcttttcagagattttttccaactgggcattctgaggcattcccatctgcttggccatctccactaacttaccaatcctgttaaagtcggaaaggattttatacacatccctgatcggactgtcaatcttataaacttcgcttgcaatctttgttgttgacataaatatattatttataattttccggattcaaacgccactctttcaatttttcaacctgctcttccttgacatatcccactttcaccgccaaatcaatcatggcattgtaattgctcaatgtagtcaattcacattttgcatttacaaaattatccacagctttctggaaaccgtaagtaaagatggctgccatacccaacacttcacatccggcattgcgcaaagcttcaacagcctgtaaacttgatccacctgttgaaatcaaatcctcgattaccactactttctgaccggctttgtattccccttcaatcagattttccagaccgtgattcttggcagacgagcgcacataaacaaacggcaagcccaattcctgagccaccagcacaccctgtgcaatagctcctgttgccactccggcaatcacttccgcctgcggatatttttcgcggacaagggcagcaaactgctctttgatataggaacgcacctccggataagacaatgtcttacgattgtcacaataaatcggagatttccaaccggaagcccaagtgaacggatgattaggttccaatttaattgctttgatatccaacaaataggatgctactttttctgcaactgtattcattttttcttatttttgtaatgataattctaatcttttgcaaatgtataaagtatttttcaaagatagctgttttttcctgacagaacaaacgaatttcactcaggaaaccaccttttcgttcaaacaccgggaatttcaagccaccaaagagtttatcctgcggttgctcgaccatccccaaccctttacagctgccatattccacgatgatgtagaagagctgctcgcaatattcaaatcctgctttacctatgtcaaggctgccggcggcgtagtccggcaagacaactgcctgctggctatcaaacgtctgggaatgtacgatctgcccaaaggccacttggaatccggcgaaaccatcgaacaatgcgccgtccgcgaagtagaagaagaatgcggtctgaaagaagtgcaaatcaccgacactcttggctccacacttcatatctacccccgaaacaaccaatggtatttgaaaaaaacctattggtatgccatgtcgtgtcctccgtatcccgaactgaaacctcagacagaagaggatatagaagaggtattctggctgccaatctccgagatagcctccatcctaccggaaacctacgcctctctcagaagcatatttgaaacaatccggcgtatttcaggatagtcatcccccaaacgtccggattcaaacaatccgtgaatccccttcagaccgggctgtatcgagtcgataaaatgctgtttccgctcatacagtccgcgcaaaccaaatgctcccatcgcctgtaacaagcggataagcacaaaacgataataatccttccgaaagacctcagcatccaccggacgccaccgctgcaattctcctatatagtaatccaacagctcttccctctgtatatccgggatggctacaatggcatcatacaacaaggatgctacatcatagtgcaacgctccttgcctgcctccctgataatcgataaaccacaccttcccgtccttcaccatgatattgcgcgactgaaaatcccggaacatgaacgtatctgccgacacgttacacacctgttccagtaacaactcaaaatcattctccaacaaatcttcagaaaaagaagctcctgccaatttcaagaaacaatacttgaaataattcaaatcccaggttatgcatctccggtcaaataccggacggggaatacaatgagaataatccaacccctcattccccaagaactggatgcgcaacagttcatccagactttttctgtaaagctccaacacctccggattcaaagccacatctctccgcccggattccaccacatccaacaacatacatccgcccaaatcctcctggatataagccaacccatcggcagaaacgacaaatacctgcgggacattcaatccttgcgccctgaaatgccggctgaaatcaataaaaagacgattctcctcccacgaggagtggcaaactcctataaaactgtcagtgccgtcaaaaatacgataatacttacgggaagaaccggacaaaggcaaagcctccaaccggtcggggcaatgtccccaatgagcctcaaacaaggaattcaaaatattctccatcatacaatatttttgcaaagatagtgattttgcacaaaaaaagagagagtcacgttgtagtaactctctcttgaaattcggcgccaacctactctcccacctttcggcagtaccatcggcactcaagggcttaacttctctgttcggaatgggaagaggtggatcccctcggttatagacaccttttaatttcttcaatatttataatctcttggcagtccgtatatattttgactcttcaggaaagaaaccaactaaaatatactccacttaaagtaaactttcgggtgattagtattgctcggctatgccatcactgactgtacacctgcaacctatcgacgttgtcatctacaacgaccctgtaaggatatctaatcttgaagctggcttcgcgcttagatgctttcagcgcttatccaatccatacatagctactcagcagtgcatctggcgacacaactgattcaccagaggtatgtccaacccggtcctctcgtactagagtcagagctcctcaaatatcctgcgcccacaacagatagggaccgaactgtctcacgacgttctgaacccagctcgcgtgccactttaatcggcgaacagccgaacccttgggaccttctccagccccaggatgtgacgagccgacatcgaggtgccaaaccgctccgtcgatatgagctcttgggagcgatcagcctgttatccccggagtaccttttatcctttgagcgatggcccttccatgcggaaccaccggatcactatgctctagtttcctacctggtcgacttgtcagtctcgcagtcaagcacccttatgccattgcactctacagacgattaccaaacgtcttgagggcaccttgagaagcctccgttactcttttggaggcgaccaccccagtcaaactacccaccatgcaatgtctccctaacgggattagacctcagataacagaagggtcgtatttcaacgacggctccataatgcctgacgacaccatctctcagcctccgacctatcctacacatctattacccaaaatcaatgcaaagctgcagtaaaggttcacggggtctttccgtcccgttgcgggtatccggcatcttcaccggaactacaatttcaccgagctcatggttgagacagtacccagatcgttacaccattcgtgcaggtcggaacttacccgacaaggaatttcgctaccttaggaccgttatagttacggccgccgtttactggggcttcaattcaaaccttcgtattgctactgagctctcctcttaaccttccagcaccgggcaggtgtcaggccatatacatcatcttgcgatttagcatagccatgtgtttttggtaaacagtcgcctgggcctattatctgcggctctattgctagagcgccctttatcccgaagttacagggccattttgcctagttccttaaccatgaatctctcgagcgcctgagtatcttctacccgatcacgtgtgtccgtttacagtacggataatcataacctgaagcttagcaggttttcttggtagttaatttacctacattattcgcgcagccgaagccttacgatactatcacctttcacctctagatacgtacttcactatatctatctctgggtacgggcttcaaccacctattccgtcaggtggcagtagtgtcatctctacgtcactgcatcgcagttatgattagtacaggaatattaacctgtttgccatcggtgtcaccgttcggttgaaccttaggttccgacttacccccgggtgattgacattgccggggaatccttgatctttcggcgtggagggttctcacctccattatcgttacttatgcctacatttgcttttccatacgctccaccatacctcacgatacggcttctaagccgaatggaatgctctcctaccgatgtattatacatacatcccatagcttcggttgtatacttatgcccgcgtattatccatgcaggaccgctcgactagtgagctgttacgcactctttaaatgaatggctgcttccaagccaacatcctagctgtctaagcagtcccaccgcgttttctcaacttagcatacaattggggaccttagctgatggtctgagttcttcctctttcgtccgtggaccttagcacccacgggctcactccctgtcttcatgtcttcgcattcggagtttggccggatttgataggcggtgaagccctcgcatccaatcagtagctctacctcgaagacaaaacaacagaggctgcacctaaatgcatttcggagagtacgagctatttcccagtttgattggcctttcacccctacccacaagtcatccgaaaacttttcaacgtttaccggttcggccctccagtttgtgttaccaaaccttcagcctgctcatgggtagatcactaaggtttcgcgtctaccgccactgacttcacgccctattcagactcgctttcgcttcggcttacgcacctgaagtgcttaacctcgccagtgacgagtaactcgtaggctcattatgcaaaaggcacgccgtcaccccacaaaggggctccgacagcttgtaagcgtatgggttcagggactatttcactcttctgttcgaagtgcttttcacctttccttcacagtacttgttcactatcggtctctcaggagtatttagccttaccggatggtcccggtcaattcggtcaggattcctcgtgtcccgacttactcaggataccactatgccgcataatattacgtgtacggggctgtcaccctatattgccgcactttccagtacgttccacttctattattttgacaataacgtggtcctattaccccgctgatgccgaaacatcaacggtttgggctgttccccggtcgctcgccactactgggggaatcacgtttgttttcttctcctacaggtacttagatgtttcagttccctgcgtttgcctaccttacggtataatacatcttcaatgtattgggttatcccattcggaaatccgcgcgtcaacggttatttgcacctatacgcggcttatcgcagcttatcacgtccttcatcgcctctgagagccaaggcatccaccatacgcccttgcttatttactttaattcatgcttactcgttattcacagtctttcgactattacttatctcgttgctcgttgtacatacttacatatgcacaatctgttgtggattatattctaatcgtttctttccaaaatgtcaaagaactgcgtaccataacggtactgtgacaggttaaaaggaatcgaaccttttctaagttccgaaaacctgtttgaagatttgttccagcaagtacgattcataataaccgatactccagaaaggaggtgttccagccgcaccttccggtacggctaccttgttacgacttagccccagttaccagttttgccctaggccgatcctcgcggttacggacttcaggcacccccggcttccatggcttgacgggcggtgtgtacaaggcccgggaacgtattcaccgcgccatggctgatgcgcgattactagcgaatccaacttcatggagtcgggttacagactccaatccgaactacgaccggctttcgagattcgcatcccatcgctgggtagctgccctctgtaccggccattgtaacacgtgtgtagccctgggtgtaagggccgtgctgatttgacgtcatccccgccttcctctcaccttacggtggcagtcccgccagagtgcccagcatcactgatggcaactaacggtaagggttgcgctcgttatgggacttaacccgacacctcacggcacgagctgacgacaaccatgcagcaccttgaaaatagctccgaagagaataactgtttcctgttacgtccatctccatttaaacccaggtaaggttcctcgcgtatcatcgaattaaaccacatgttcctccgcttgtgcgggcccccgtcaattcctttgagtttcatcgttgccgacgtactccccaggtggctcacttaatactttcgcttaatcccgtactgtatgtcgcacagaaccagtgagcatcgtttacggcgtggactaccagggtatctaatcctgttcgctacccacgctctcgtgcttcagcgtcagtcacagtctggtaagctgccttcgctatcggagttctaagttatatctaagcatttcaccgctacttaacttattccgcctacctcgtctgtactcaagctgaccagtattaatggctggccaaggtttagccatgacattttaccactaacttaatcaaccgcctacgcaccctttaaacccaataaatccggataacgctcgcatcctccgtattaccgcggctgctggcacggagttagccgatgcttattcattcggtacaggcatcgtcccactcgtgaaacttattcttcccgaataaaagaggtttacaacccatagggcagtcttccctcacgcgacttggctggttcagccttccggccattgaccaatattcctcactgctgcctcccgtaggagtttggaccgtgtctcagttccaatgtgggggaccttcctctcagaacccctacctatcatcgccttggtgggccgttaccccgccaaccagctaataggacgcatggccatcctttacctccgtagatttaactccatccagatgcctgaacaaagtattatgggattttaatccacgtttccatgggctatccccctgtaaagggcaggttccatacgcgttactcacccgtgcgccggtcgccatctgtaattagcaagctaattacaatgctgcccctcgacttgcatgtgttaagcctgtcgctagcgttcatcctgagccaggatcaaactcttcatagtaataaaaactttaaattattttctctttagcccagtcattatccctcggaatttattcctcggactcgcacttgctgtttttcaaacctttcaatatcttaaagaactatctctttcttgtttgtctgtcgctcattttcaggagcgaaagcggacgcaaagataaggagttttatttgatacttccaaattttttcgcatcttttttttcaagaaatttttcagaacttgttttcaaaaccccagaaccaatttgaagtctttcattttgaaagcgggtgcaaaagtaatgctttcgtttttaacttccaaactttttgcaaagtttttttgaagttttttttcgaagcctttcgccttacaccatcctaaagaactattgctatcagaaactgcctgtaaatcaattcttcaacccctcttacctcctctattgctttaggtgtcatttcctgattgcgggtgcaaagatacacccttttattacctatttccaaattttttgaccacttttttcatgaaaattttaaagtttttcgcaacgtactgataatctgatatgtataaatgacggtttttgagacattaaatgctcggataacagacatactgctattttactgctgaaatttggtcaaaatcacctatcatgcgctctaaagaatgctattacggactgaaaatgctgcagagtatgcccgtttttactgattttatagatatatccaccataaaactctgccttttctaccataaaaccggctatccaaccaaccttataccacaaaacaccccctattttccctccagcctcctacaattaccccttcctgctccgttcctcacccgaacctcagccgttatcgttcggagaagcttcggaggaacttcggacaaggaacggagaaacgtaagacatctgtgagacatgggtgggacatccgtatgaatgctttcggagaattctacaacatcaaacggtatatactatataaagaacggaatccacagataaagcaaatcctcccatgtgctaacgaacatgggaggatttaattgctatatatattatatatattatcaaaaactcacttgcaagcgtgcctgcaacaagtcaaaatcaccaccacctttaggagaagaatcacccaccatcatacgggtataattcaacttagcggcaatgtatttattaataaagtaattcacaccaacagtaatatccgacaatcgacctccctgcactccggcatcattcagatttacattatcgtaacgcagcaacaattccagacttttgggagccggattacccatcatacctgtcgatacattataattatgccgctcgcccaatatcaaatagcctgcttgtgcatatccaccctttccattaaaattatcgacaccaccacgatttaaatgagcaaacagatactgtccctgaaaataccatttatcataaatgaaaatacattctgcatccaacttccaggagttaattacccgatcgaccgatgcatccacaaaaccattttcgctttttgacaccaaattggtcggaacacctccagcaaaatccatcacgtccttaccctctgcaaaacgaggcgccaatcccaaatgtaatactcttccttccttcatcaaaggacgtccgataaatttagcagcgatagcatatccctgatccatctgtccggaagtctgaatatcaccaccgctaaacactcccgccatcacattcatccaattgtgattgtaactatagctgattcccaactcgcgtccctgccccaaggcgttatccgcagtagcattctgcataaaacggaagctggccgtaccgacacgggcacttccccacggttcataagcgtatcccaggcgaaataaatgtttgtcgagcttataacttacaaaaatatctttcatactgactttcttatcagcatatcccaattctatcttcgcctcccaattatcaaaaatcttcacgactgttcccaaacggacatcatgcacctgaaaagcattgccccaacccagggtatcattcataaatacaccgccatcaaaaaagactcttccgatcaaccgccactgcaaaggatttttctctgaaacattttgattttgcgctgttgccaaagtcgatgatgcacctcccgcacatagtactgctgtcaacaaaaaagacaaaataatttttttggaattttttctcataatatttatccagatatgaaattgaaagtttttaaatttaacaagactcattttgtatccgccaaaagtacaaaaacaaagatgattgtacaaatccaccaggaatgaagtaaattcgtatctttgtcagctgaaactttaccgacagcatcatgccacaatttggattattcgcacaaataatgacctccttaagaaacagaaacttccgtctatatttctgcgggatgagcatctccttgattggcacctggatgcaacaggttgccatgagctggctggtctaccgactgaccggctctgtgctattgctagccagtacagctttcatgtcacaaatcccagtactaatcctaacacccctcatgagcgtatggaccgaccggacagaccgccgaagaattctatttttcacacaaagtctgtctatgctacaagctgtagcattaggtctactgtctctttccgggtatattgaagtatggcacctgttagcactgagccttttcatcggatgtgtcaatgccttggacaacccgacccgccaggcattttatcccagtctggtaaataaagacgaactgggtaacgccattgccttaaactctgctgtcatcaatggttctcgcttgataggtcccgccatcggaggcgtcatcatcagtatcatcggagaaggctggtgtttccttatcaacggactaagttacataggtgtgcttattgccctagccatgatacaccaagtggaatttcatccacaaaataaacgaggaaatgtcattacagaaatgtatgaaggattcagctatatccgacaacaggaggcaattcgagttctattgcttaccatgtgtgcattcagttttttcggactaccgttagtaacgttcattcccgcttatgtcaaagatatattgggaggaggaagcgaacttctcggcggattaatgacttgcaccggcatcggctcttttattgcagccctctatcttgccatccgaaaaaacagcatcggattggaacgatttatttcactttccggcctgctactaggcggcagccttcttacccttgccgggacacacgacattcccattgctgtaatggcatgcataccagccggatttgcccttattgccacggctgcttctatcaacaccctagtacaggaactaacagacgaaaacaaacggggacgcgttatgggatacctggccatgacattcaccggcatcagccccctaggcagcatggtgctaggtgccatggtcgaccgcttcgggcttccgacagttatcacattatcaggactggcttgcattctgatatccatactttttgccaaaacatacaaaccgacagtcgccctttcattccagcaagcctataaagcaaaccactccaaataaacaaattcagaaatacaaatcccggtcaatccattatatacattctacaaaccaatatttttaacaaaaaaaaacacatacacatatacaagtcgctttttttatattaatattgcattggaactaattttaccaaatccaacaaaatatctagacttatgaaaataaatattccactattgggtttactcagcctgctcggtttattattattccaatcacctgctgaagcaacagacatgcacccaacagacaaacgtctgcaagactccgtagcagcagattcaaacatcacagttgtctcctatttctgcaaacgggatacatttatctattgcattggtgaaagttcctggaaaatcaaagagaaagacaccatccgtttgtccgcattatctactcaagttatgctaacagtaaccgactccacaccacaaggatataatatggaatatacatttctggattttcaagctgatacaagtgcaacctcccttgaaggcaaactacaaaatcaactggtaaaagcattcggagaaaaaatcatcggcacggttataaaattccgcattgacgaatacggaaccattctcgcatacgataaccttaacgaaatcaagaaacaaagcaagaatttattcaaaatggcatgcaaggaaatggaaaaactaccggaaatcaaagccataaaaaaacacgacttcgacgtgactaaagccatttctcaacacatcgatgcagaagcacttgtagccggatatgtcgaggaactggaactgctgttctccattcatggcaaccaatacacattaggctcaagaaaagaacaccaaaacgccaccgaagaagaatatgaatcagacacatattatgatatttacgcagactctgaaaccggagaatatggaatcaccatcgacctctatgaatatattccaaaagaggatataaaagctttgacccaagaaatggtaaacaccataggaggtaaaaaatggaaaaaagaagctaacgaagccttgaacaaaggttttgagcagcaagtaaaagaagacctgacccgaaacagctatatccacataaaacattttgccgatggttggcccaaagaaataataacccaagaaagtatgctattgatgggacaaggtaaagttaaacaaacacatatcacctgggactattattcagtaagaaattactgataaaatttcctctatttattcttatgatacgtgttcttatttgtgtttttaagttatatttgttgcacataatattttattaatatcttaatacgtattactatgacttttgctgtagcattcttcgtcgtatttattatcggagtatggaaaacccttgaaaaagccggacaaccaggttggggcggacttattccaatttacaacctttaccttcttacacaagttgcccaaaaaccgggctggtgggttatcatgtttttcattccaattgccaacattgtattcagcattcttttatacaatgaaattgcgaagagattcggtcagggtgtcggttttacaataggcttaatcctccttcctgcaatatttttcatgctgttaggttttgggaactacacttacaaagcagaataagacctttaaatcaaataaaaacatatatatcatccattccatttcaaaggaaataggatgttaatggtatgactacttggcgaattcatctgtttttactacatttgcagcctaaaataaaatacacattaaaagattagaataaatggcaacaacagcagatttccgcaacggattatgtattgtattcaaagacgatttatatacaatcgtacagttccaacacgtaaaacccggtaaaggtccggctttcgtgagaaccaaactgagaaatgtaaaaactggaagaattctggaaaatacttttacatcaggaattaaaatcgacacagcacgcatcgaaagacgtccgtatcagttcctgtacaaagagggaagcgactatgtgatgatgcatactgaaacttacgaacagattaatattcctgaagaactgattaacgcaccgcagttcttaaaagagggagatgcagtggaaatggtagtgcatgcagatactgaaactccgctgtatgttgaattaatgcctagtgtagttttagaagttacttacactgaaccaggtctgaaaggtgataccgcttcttctactgcattgaaagcagctgaagttgaaacaggagccagagtaatggtaccattatttgttgagacaggagaaaaaatccgcgtatcaacagcagacggttcatacgtagagcgcgttcgttaatctaacgtatttaattgtataaacaaggctataagcaaagattgatttcgattttatcgcttgtagccttttttgtatctacaagcaaacctattcttcgacaccactgactgccggtttgggcaaagcattcaccacaacctctgctgcatgttgttctgcttcttttttagaactaccttctccacgacctttttcttcaccttgaatagtcactacacataaaaaacgattctgacgtttgcgataagcttcttctgtttggaattgcacatccattttatttttctgtccccactcaatcaacctgctcttgtaattagtatcaacagcaaccagattttttatatcaaaaaaattcgggaaaataaatttttctataaaacgctttgtatttacaaaaccctgatccaaaaacatagcgcccacaaaggcttcgaatacatccccatagatatgcttgttgtgtgagatatctgatttggcaacgacctctttatccagaccgatatttatagccaattcatttaatgattcgcgactcacaactttagagcgtacacgtgtcaggaaaccttcatcctgattcggaaagaatttatataacaactcggcaacaatagcccccaatactgcatcacctaaaaattcaagacgttcataattaagaacgactccatttgcagtcattttagatgccgatttatgtaaaagagccaaacgatacagccctttattgtttgggacaaagcccagttgagaaatagacaatccataaaacttgccatttctatgaatgtaaagtcttatggattgaattatttgcttaatcacagtccaagggtttagttgtatgtgattacttttttataacgatacatgcgttgtgtccaccaaatccgaatgtattgctcatagcaactttcacctcacgcttctgagcttcattaaccgtcaagttcaatttcgggtcaatttcaggagccaaattatggaagttaatggtcggaggaacaatatcgttctgtacagccaaagtacatgcaatggcttcaatcgcaccggcagcacccaataagtggccagtcattgatttagtagaactgatattcaaatcataagcatgttcgccaaaaactcttacaattgcagagggttcagaaacgtcacctaaaccggtagaagtaccatgaacattgatataatcaatatcttcaggtttcattcctgcatcttcaagagccaataacataacatcgtaagcaccatccggattcggagccgtcatgtgatatgcatcgcagtttcctgcaccaccagccaactctgcataaatacgtgcgccacgttttactgcatgttcatactcttcaagaatcaagcttgcaccaccttcgccgataacaaaaccatcacggtcagcatcaaacggacgagatgcagtctgcggatcatcattgcgcgtagaaattgctttcatagcattgaaaccgccaacaccagcaacggtaacagcagcttcagaacctccagcaacaatgacatcagcttttcctaaacgaattaaattcaatgcatcataaatcgcatgtgcagaagatgcacaagcagaaaccgttgtatagttaggacctttcaatccattttctatagcaatcatggctccacccatattagcgatcatctttggaataaagaaaggattgaatcgtggcgttccgtcaccctttgaaaaagcatcacactcttcaaagaatgtctgcaaaccaccgattccagctccccatattactccaatccgctttttgtcttcctgctcaagatccaaaccagaatcctttaatgcctctcttgcggcaatgataccgaattgagtataaaggtccattttacgaacttcctttttatcaaaataggcagtcggctcatagtttttcacttcacaagcaagctgtgtgcggaattttgacgcatcgaaacgagtaataggaccggcgccactgacgcccttaattaagttgtcccaaaactcaggtacgttatggcctaaaggatttattgttccaagacctgtaattactactcgtttcagattcatacaaatcagtattaaattactttacgttagcttctacgtaagagatagcgtcacctacagtaacgattttttctgcctgatcgtccggaatagtaatattgaattctttttccaattccatgatcagctcaacggtatccaaagaatctgcacctaaatcgtttgtgaaggttgcttctggtttaacttctgatgcatctacacctaatttctcttcaataatccgttgtactctttcagtaatgtcagacatagctttaaattttaattagacattcttattaatttcactctacacactttgaagtgtataataatctaaattcaaggcacaaatgtagagtttatttttttactgaaaaaatattttgccaacaattaaactttcactacctttatagccttgatatttaaataattacaaaatgaaaaatatagcaatattcgcctctggatcaggttctaacgccgaaaacatcatctgtcatttcgctcaaaaaccggaattctgcgtaaaaagaatctattgtaacgtccccgatgcctttgttttggaacgtgccaaaaaatacgatatccccacgaccgtttttgataggcaagcattccgcgatccggaaaagattttgcaccaactagaagaagagcaaactgatttcattgtattagccggttttctatggttgattcctgattttattatagcagcctatcccaaccggattgtgaatatacatccggctctattaccttcctatggcgggaaaggaatgtacgggcaccatgtacacgaagctgtcattgcagccaaagagcaagagagtggtatcaccattcattttgtcaacgaacactatgactccggttctatcatatttcaagcaaaatgtccgataacaccagaagacactccagattctttagccgaaaaagtacatgaattggaatataaatatttcccacaagtgattgagggaacaatcgaggatattctatcggaataatcatatacatacacacaaacgatacatgaaattcacacacttccacgtacactcacaatattcgatacttgacggagccgccagtattcccggcctgatagataaagctatagctgatgggatgccagccatatcgcttactgaccacggcagtatgtatggtatcaaacttttttatgacacctgtcgaaaaaaaggtatcaaaccgattctcggatgcgaaacatacgtagctcgtgtatcacgatttaacaaaacccagcaaatcgaccgctcaggagagcaccttatattattggccaaaaatctgaccggatacaaaaatctggtcaaactggtttccgctgcccatgtggaaggtttttactaccgtccgcgtatcgacaaagaacttttgcaacaataccacgaaggactgattgtttcgtcagcctgccttggcggtgaaatcgaccagaaaatcatggcaggcaatattgaaggagccgaggctgcagccaaatggtatcaggacctgttcggtgaagactattatctggaagtgatgcgccaccctgctgccgatcccaagcagcgcgctgaaatatatgaccaacagcaactatgtatccaggagaaaattaaaattgccaagaaattaggcattaagctgttggcaaccaacgacgttcacttcctaaacgaagaggatgctgaagcgcacgacctgctgatttgtctaagtacaaaaaaagacattgatgacccgaagcgaatgcgctatacccgtcaggaatggttcaagacaacacaggaaatgatagacctcttccctgatttgcctgaagcaattgccaatactcaggaggtaacggacaaagtggaagaatatcaattggattctgaccctctgatgcccgtttttcccattccacctgaactgggaacagaagaggaataccgcaaaaaatattctccggaagatttgtttaatgaattcacccgcgatgagaaaggcaatgtggtgatgtccgaagaggatgcccagaaaaaaataaaaaaactgggagggatagaccgcctctaccgcatcaaactggaggctgactacctgaaagaactcaccatgaaaggtgtcgtgaaaagatatggcgaaaatccggcaccggaaatcatggagcgcatcatatttgaattgcatatcatgaaaaccatgggatttcccgggtatttcctgattgtgcaggattttatacaagccgctagggatatgggcgtaattgtgggtccgggacgtggctcagcagccgggagtgccgttgcttattgcctggggatcactaatatcgaccccattaaatatgatctgctgtttgaacgttttctgaatccggaccgtatttcattacctgatatcgatgttgacttcgatgatgccggacgccaacaggtattggaatgggtgacgcagaaatatggagcagacaaggtgtcgcacattgtgaccttcggcagcatggccgccaaaatggccatcaaggacgtggcacgcgtattgaaactggagctttcagaatcaaacagactggctaaaatggttcctgaagctcctaagatgacgttgaaaaaggcatacaaggagaatccggatcttgaaaaagaaaaacaatctgccaatccgcttatttccaagacaattcaatttgcagagacattggaaggctcgattcgccagaccggagtacacgcctgcggaatccttatcagccgagacccgctaacagaccatatacctattatgcctaccgaaggagagagtttgatgacgacacaatatgacggacattttgtagaacctatcggtttgattaaaatggactttttaggactccgtacattatctatcatcaaaacttgtttggaaaacattaaaatatctcgccatttagtattagatgagaataagattccgttagacgatgaagagaccttcaaacttttctcccgaggagataccaccggactgttccagtttgagtcgccgggtatgaaaaaacacttacgcgccctgcagcctaaccggtttgaggaccttgtagccatgaatgccctctatcgccctggtcctatggaatacattccctccttcatccgacgtaaacacggagaggaacctattgaatacgaccatcccatgatggaaccttacttgaaagatacatatggtatcacggtctatcaggaacaggtgatgttgcaatcgcgtgccctcggcaacttcactcgaggtatgtctgacacattgcgcaaagcaatgggtaaaaaacagtttgaaatgatggcacagctcaaagacaagttcatggaaggatgtaaaaataatccggaatttgtcaaaggtgcgcaggaaaaagggaaatcgatagaagaccttgtcaacaagatatggggagactgggaggcattcgcatcatacgccttcaacaagtcgcactctgtctgctatgcctatatcgcttaccagaccggttttctgaaagcccactacccggcagaattcatggcagccaacttgagcaacaatctctcggacatcagcaaggtgaccattttcatggacgaatgcaaacgcatgggactgaacgtacttgctccggatgttaacgaatcatacaatgacttcaccgtaaacagtcgtggacagatccgattcgggatggctgctatcaaaggcgtgggagaagccgcagtagaaagcattatcaaagaacgggaacaaaacgaccaatataaagacgtatacgatttctttgagcgaatcgactataggacagtcaataaaaagactcttgaaaacctgattacggccggaggactggacagtttcggctaccatcgtgcccaatttttccgaccgatagatgctactaccaatgtcttggatactcttgttaattacgggcaaaaaaaacaacaagatgccttgaatttgcaaacatctctctttggtgataccgaaggctttgaaatagccaaaccagcaattccagattgcgaaccctggcacgactatgaaaaatccaaaaaggaaaaagaattaatcggtatttacctgacttcacacccgttagatccatacaaactggaaatgcaattactctgcaaaccagttgaagaactaaacacaaatctggaaagttttaagaataaagaagttacaattgctggaatcatcacaggcagacgcgaaggcaaaactaaaaacggcaaagatttcggaatcatcaccatcgaagattttagcggaacatatgaactgcctttctttggtaaagactatgcaaactatcatcaatattttatagatgaaacagccatttatgttaaaggcaaggtgggaccaaggtggggcaacgagaaagaactgacattcaatattcaaaatgtagacttgctagaaacaatcacacaaaatgccatcaagtccattattctacaggttgatatcgaaaaattgacactggaaaccatcaatgaaatacacaatctattcataacagatgttacctcacaagcctacaaagaagcacaacaaaaaacaagtgaaggaaagaaatcttcccagaatctccctgatgaacagcccaatcaaaatgaagtgcccttacattttatgctttatgatacacaagggaatcatgtgaggatgttttctcgcacttgtaaaatacgaaaatccagagagttatacgaatatttcgaaaataatgatgcagtaaaaatgaaaatagaaggacaattttaacgttctattatcaattctatgtattgaatacaataaaattgttgtaacttagcggagtaaaatgaacaattaaacttttaaaagataaaaactatggctttagcagttaatgattctaattttgacgaggttgtactgaattcagaacagcctgcaatggtagatttttgggcagaatggtgtggaccatgcaaaatgatgttgcctattgttgaagaaatttcagcagaattcgaaggtaaacttacagttgcaaaagttgacgtagatagcagtcagggtactgctgcaaaattcggcatccgcaatattccgacaatcttattcttcaaaggaggaaaagttgttgacaaacaagtaggagctgttcctaaagctgcattggttgacaaaatcaacaaacttctgtaagaagagcagaaactcataaaaaaagcgtgtctgttgacacgctttttttataacttactcctccctaaactcatttttgcataacagacacagaatccttcaagatttcctgcttgataggcttatgcatacctacaagcatctgtatcaaagaatcccttgttgctataaatttcggcatattatcctgacttaccggctttttcggttgggatttaatcgtcaaaggattgataggtctaccattttcgtatactcgaaaatccaaatgaggtcctgtagaaagccctgttgagcctacataaccgattacttccttttgtgcaactgtattacctactttcagtcctttagcaaaacgagacaagtgcatataagttgtcgtataaacactattatgctttatctttacataattaccaccacctttagcctgataacctttcgcaattaccctgccactaccaatcgcataaaccggagttccaacaggagctgcataatccacaccatggtgcgcacgataacgtttcaatacaggatggtatctgctattagtaaaacgagaagaaattctgaaaaaatccaatggagccttcaaaaaagcaccttccaaactattccccttatcattataatataacacttcaccgtcctgctcaaaaggtattgcataataagtactatcaccatgccgaaaagaagctgcaataatattaaagttcaacaaatccttgccgtctacattctcctgttcataaatcacacggaactcatcctgcttctgcaaaccgaaaaaatcaattgtccacccaaatacatttgataataccaccgccaactggggatctgtttcctctttttgcatagcaacccataaagaagactccacttctcccatcacctccttttgaatccatttcactggattttcaccacgcgtcactttataattacctcgcaaatcaaaaaccacataagacttcggattttcttcatatacaaaaaattcagtcatcgggacactatctttagtcataaaaacagcatacgactgaccacttcgaattttacgaacatcaaaaacaccctttgcagctaaattcaaatcatgaacttgacgaatggaaagtccatgcttttccaatatcgtagaaagactctgatttgccttcactaaaccataatcaacattataatcatccactgggataccatatttatacacgatttcctgcacttctacggaatctgttacttcgacctcatccaatggctcagtatcatgattcttcggaataaaaattacaactaacaaaacaacacccaacagggatgataataaaatctgctttttcttagataacatcatttttaatattctttttccacacaataaaccaaatcgcagcaatacaaacacataaacttccgatacaataagcaatacctggtgtcaaacgtaacccttccggcgatatacataagtaagtagaacaaacacatgtcataaacaatgcaggaatcaatgtcacccaataatatgcaccttttcgagccaagtaaacggttatagcccaaagcgtaaacacggacaatgtctgattagcccaagcaaaataacgccaaatcatatcaaagccagctgcatcttttaaactatacaataataatccaattgcagccaaaaacatcgggatacaaatatacaaacggcgacgtatactacgctgctccatccccataaaatcagccacaatcaaccgagccgagcggaaagcggtatctccagaggtaatgggtgcagcaataacacctaaaatagccaatacaccaccaatagtccccaaccaatctttggttattgcatcaacaatgaccgaagcattggtttcattcattccattttcatgataaaaataagttgctgcagcagcccaaattaaagcgacaattccttcggtaatcatggaaccataaaataccggacgaccatatctctcatttttaaggcaacgtgccatcatcggagattgagttgcatgaaacccagaaattgccccacaagcaatactaacaaacattatcggaaaaataggaagattcgacgcattaggatgagtattgtgtaccccttcccataactcaggaagttcaggactattcacatacaacatcaccaaaatccccactgccataaacaataaagccactgcaaacaagggatagattttaccaataatcttatctacaggtaataaagtcgccaaaatataatatacaaaaacgacaataatccaaaatgttgcgtccaatgactctggagtcaacttcgccaacaaaccagccggtcctgccacaaacacggcacctaccaatatcatcaacaacacagtaaatacccgcataatctgctttgccgttatccccaaataacgcccaataatttccggaagactttcccctccatgacgaagagacaacatccctgacaaataatcatgcactgctcctgcaaaaatactccccaatacaatccacaaataagaggctgtaccaaattttgctcccataatagcaccaaaaataggtcccaaaccagcaatattcaaaaattgaatcataaatattttccaagtaggcattggaatataatctacaccatctgccttagtcaaggcaggagtcttacgcatcgcatctggcccaaaaagacgttcaacgaatcgtccataaatgaaataaccggcaatcaatgccaacaaacaaattgtaaaagaaagcataagtcaattagctaagattgttctatttttaattctattcttacttcctacggccttttttctccttcttatctaccctcttttttttaccgcttttatcacttttaacgttataccttaattttacagcctcttttattctcccaccacctacacaatcatcctcttgtttttcggccaactcataatctaactgacgtgcaaccaaatttgctttagcgaccctaacttttactttatcacccaattggtacgatttatgatgataacgccctacgatacagtaatttttctcatcaaattcatatgcatcatcctccaattctgtcattgacaccaagccttcacatttactatcatccaattccacataaaagccccactgtgtcacacctgaaattgttccatcaaaaacttgccccactttatctgccataaattcaacctgcttatatttaatggaggctctttctgcatttgctgccacctgctccatctctgaagaatgtttacagaactcttcatatttctccttattagctgaacgtcctccctccaaataacgttgcaacaaccgatgcaccattacatccggatatcgacgaatcggagatgtaaaatgagtataataatcaaaagccaaaccataatgcccaatattatctgttgaatattcagcctttgccatcgtcctaacagccagcgtttgaatcatactctgctcaggcttctcacgcacttcagccatcaagttgttcatcgaagtcgtcaatgccttgcgactacccgtcttaacaccatagccaaaacgtgctacaaaacgattaaaatcctccagtttttcaggtaatggctgttcatgaatacgataaacaaaagtctttgccttcttgcccgcctgtggtcttcctataaattcagcaactttcttgttggccaacaacataaactcctctatcagcttatttgcttccttcgaacgcttaaaatacactccggtaggatgccctttttcatccaaataaaatttcacttcctcccggtcaaaatcaatcgctccagctttaaaacgctccgccctcatcttttgagccaggtcatttaacaatagcacttcttttctgtaatctccttctcccccttcaatcattgcctgagcctcctcatatgtaaagcgtctattcgaacgtatcacagtacgcccaaaccactgtcccaacaccttagcctctgcatccattcgaaaaacggcagagaaacataatttatcttcatcaggacgcaatgaacaaacgccattacataaacgttcaggcaacatgggtattgtgcggtcaaccaaatataccgacgttgctcgagcatatgcctccttatccaatgctccattttcctttacataaaaactgacatcagcgatatgtacgcccacttcatattctccattttccaactctcgcacagaaagtgcatcatcaaaatccttagcatccgcagggtctatagtaaaagtaactacactacgaaaatcctttctatcccgtatttcatcttcaggaattgtcaaagaaatcttttccgctaatctttctatacttgcaggaaatttcactggcaactcatattctgccataatagcattcatctccgtatcattgtcacccggacgtcccaatacttcaaccacctcacctactggatttttttgattatccggccaactattaatttttacgaccactttatcgccatcctttgccccatgcagattatccattggcaagaacacatcatatggcaattgcttaccagacggcaccaaaaaagcataacttgcagaacactgcacaataccaacaaaagtacctctgcttctctccaatatttcaacaacctcaccttccggtctacgattacggctacgcgcatacaccaacaccttcaccttatctccgttcaaagcatgcttcaaattcgggaatgccacaaaaacatcttcatcacattcgtctgacaaaatataagcagcccctttcgctgtcaaatccacaactccgacaatatatgcccctgcacttttaaacttatacctacctgtcgaaatttcatccaatacaccctggcgtcccatctcccgcaacacttccgaaatctgacgtttcatatccatcttacgcgcctggatatgctgggccacttccttataattaaaactttgggacggatgattagccataaatgccgtaagccgctcccacaattcagccttactcatcgtcggctcacattttttcttcttcttattcatattgataaattttgacccctaaatataaaaattttaattgatatttatattacatttgtaattaattaatcacaaaaaaaacgcacatgattacttacaaacacttattatgttcattaggattactatcctttgcattactgacatttagttgtacaacaaaagcaaaaaaagaaacgcttacagtagataaggcaactgtcgaaaaagcacccccctatttcaccggctatcttaacggtcaaacaaccccttacacaacagagactcctatcgctctatccgatatcaataaacttcaagcctctgtatggcaagcttgggtaaatgccaacaatagtttttccgagcagaaactaccccagctagacaaacttgccaacgcaaaatccggtagttggcaactaccatccaatctggaacccaatgccaccatgccattttattggggctataaaggagactccatcccacaagaaggatacccacttttcctatacctacatggttccggccctaaagcacaagaatggaaagccggtcttttcatctgcaacggttttgatgatgccccgtcagcatactttattcctcaaatccccaatgagggcgaatactatcgctggtggcaaaaatcaaaacaatttgcatgggaacgtctactcagacaagcatttgtaagtggcaaattcaaccccaacagaatttattgttttggtatttctgaaggtggttacggcagccaacgcctggcttcattttatgctgactatctggcagcagcaggtcctatggccggaggcgaacctctaaaaaatgcaccggcagaaaactgccgcaacatcgcattctctcttcgcacaggagccgacgatgccggattctatcgcaacaaactcactcaatatacaaaagacgagtttgcacgtttacaatcactttaccccaataattacactaacaaaatcgaactgattcccggctaccaacacgcgattgactacaagccaacaactccttggttgaagcaatatgtacgtaatccatatccaaaatcattcaactgggaaaactttgaaatggatggtttatatcgcaaaggcttttataatctggcagtcgtagaacgttctaacgacaatgaagaaagccgcacttactacgagatgaatatcaatgacaataaaatcgatctcaaagcagacattgtcacctacaaatgcattgaaactgatccacattggggcatacagctaaaatttgaaaaaagctatcaaccagccaccaaaggcaaagtcattatctacttaaacgaccaattagttgaccttaaccgagaagtaatcctcacagtcaatggcaaagaaatgtttagaggaattgtaaaaccggaattgcgtcacctcatcaatagttgcgcaacattctttgattcagaacgtctttatccggccgccattgaagtagaaatcagcaaataacaatacaaataaaaggctaaaaacaaatgtttttagccttttatatttttctcaaagagactattatttaatcaatcccttgtcaaatttctcttttacttttaccaacatatcatcagtcatgctctttaaatcgaatttaggagcccaaccccattcttcacgagcacaagagtcgtccatactattaggccagctatcagcaatagcctgttttacaggatcaatctgataatccattttgaaatccggaaggtgtttgcgaatttcagctgcaatctgttccggttcaaaactcatagaagcaatattgaagctattacggtgtttcaattttgcaggatcagcctccatcaactgaacaacagcattcaaagcatccggcatatacatcatatccatataagttccctctttaacattacaagtaaaagaacctttacggattgcatcataataaatctcaacagcgtaatctgtagttcctccgccaggtaaagtcacataagaaatcagacccggaaaacgaacgctacgagtatccactccaaaacggttgaaataataatcactcaacagctcaccggtcactttacaaacaccatacatagtcgtattagaacgctgcaaagtatcctgcggagttttgtccttcggagtatcgttaccaaatgctccaattgaacttggagtaaacacagcacaattgttatcttttccgatatacaaagcattggtcaatgcgccaatgttgatatcccacgctaatttggggtttttctctcctgttgcggacaacaaagccaccaaattgaaaatagtatcaatgccatactttttgacaacagctgtataagcctctccatctaaagcattcagctcttcaaatggtccagcttcagccaaagcacggcatttatcggcactgatatcagctgccactacattgttattaccataaattgaccttaaatgaggaaccagttcagaaccgatttgacctccagcaccaacgattaatatctttttcatcgcagagttaaattataattcgaaaacgttgcaaaagtaaccatttaaacgcttacttatttgaaatttgctataatttttgcgttttaactaaaaaaacaatcgtttttatcagattccgcttcataatacgaatctacacctaaattttgttgtttataagcttccacagccaactgatcacatctctcatttccaggattatcagcatggcctttcacccaaacaaacttcacatgatgctttcgataaatagctaaaaagcgcatccacaaatcgggattcttcttatccttaaacctttttttctcccaaccgaacacccaacctttttcaacagcatctacaacatacttggaatcagaaaaaatagtaacctccataccctcaaaccgtaatgcttccaaacccacaatgacagccaacaactccatccggttgtttgttgttttacgaaatcctccggaaatttcctttctatgcacaccggctaacaacaaaacaccaaaacctcccggtcctgggtttccactagcagcgccatcagtatacattattatattagcagataccatatttcataaggttataaaactaaactcaaccttccctcaatgacaaaaataaccattttttcaaaaaacataaaatcctccttctcaaatacactcatatgccctttgaattatttttactatttttatagcgctattgaaacacttggttaatgaacaaatcagaactagatataaacgctttatcaaaaggtaatacagaagctttttatattctgtacaaaaaattcttcattgcactatgcatctttgctcaaaaattttctattgaaaaagaggcagcagaggatattgtacaggaaatattctataaattatatgaagagcgccaaatctttcatgatattcttacactacaatcatatttgtatacctctgtcaaaaatagttgtctaaattatatccgcaacgaaaaaaggcgcaaacttcgagagagctattattatgacgaaatctacaacaacgaaaccacatttatcaacaacactatcgaaaacgaagtatacagggaattataccaacttttagatgaactacctccacaatgcagagccatctttgaaagagtcctgcaaggagaaacttccgaaatgatagctaaagccatgcacctctccatcgaaacagtcaagacacaaagaaaaaaagcaaagcatatcctgaaagaacgctataaattattattcaacatcatcggaatctttctataattttttcaaatataggatacccactttttcatttggcggtgtcataattgaaaaaacaaagaaaatgaaaatatatctacttcataaaatttcaaaactgctcattgcttataaaacccaaagcattaatccacaagaagaagagcaactattaacatggcgaaaagaaaaatttgaaaacgaagaactttttcaaaaaatcaaccaaattaatggatttgaacaattccgtaaacagtacgaagaacatgattataaccccaaattccttttactaaaacaaagaatcaaagaaaataaacacaaaagagttatcggacacctatcatatgctgcagtatcactcgcattcatatttgcaatatggggtattgttcaattccaaaaccaagaaactccccctgcgaaatacacatcaattataccaggtagatccaaagccattttaaccattggtgaagacaaaactatttatattgaaacggattccaatacaatcgtacatgaaatagatactaacatctttattcaacataatacattacaatataaaaaaacaccacaagcaactgacattaagactcataaattaaaaatccccagaggaggagaattctttgtccgcctatcagacggaacaaaagtatggttaaactctgaaagtgaattaaaatatgcctctaaatttgaaggaaaagaaagacgtgtatatttaacaggagaggcctattttgaagtatctcatgacccaaacaaacctttttttgtagaatcaaagaatttacagatccaagtattaggaacctcctttggtgtcagagcatacaaagatgaagattatgcactcacaactctagaaaaagggagtgtcaatattaatacagcaatatcatctgtaacattaaagccaggagaacaagcaaaacttcatgacaataaaataaccgtcaacaaagtcaatacccacacattcacagcatggcgacatgggaaatatattttcatcaacgaaccattaggagatattatgaaaaccttagcacgttggtacgatgtaaatatattctacacttcatcaaaattagaacagattccattcacaggcgaattaatcagatataaaaacatagaagaattactgagaaaatttgaaatattagaaaaagtaaaatttgaaataaaagataacactgtaactatcaaagaatattaaaagggcagagattggtaccagcaatctctgcaccgataacccacaaaagtggatattgtttaattaaaactgttttacaaagctatgaaagaaaatgatttttttctacctcctaaaaagaaaattagaggtgcagttcatttatttatgtttttatttttattgctttcgccgggattttcaatcgcccaatacaaagcacaattaaatatcaacataaaaaatggcactctcgtaaatgtttttgaaaacattcaaaaacaaagtgaataccgatttatgtattccaatcaagatgttgcccctattaaaaacatctccatccagagagaaggcgtatccgtacaagaaattttagatattgttttaaaggaacataatctaacttacttaatagaagacaaaataatattcattaagccacaacctcaaacttctgtcgtcaaagtcagagggaaagtaaccgatgaaaaaggagaacctcttgcaggagttacaatccttattgaaggaacatacatgggaaccacaacagatagcaacggcaactatatctttactattcccccaaaagacaatctaaacatcatatattccttcatcggtatggctccttacaaagttgcatacacagggcaagagaatataaacgtcatattaaaagagtctacagagaccatagatgaagtcatcgtaacaggctaccaaacacttcgaaaaagcgatattgtcggttcagtaagcactgttaaagcgtcagacatcatgatgccagtttatacatctgtagaccaaatgctacaaggtagaattgccggaatgatggtgatgaatacaagctctcgggtcgggacctcgcccaaaatccgcattcgagggacatctaccattctagggaaccaagatccattgtgggtggttgacggagttattcaaccagacccgataccattaaatcaaaatgatttaatggttgatgatttaaaaaacatcctaggaaaccaaatttcttggcttaatcctgcagacattgaaacggtgacaatcttaaaagatgcatcagcaacagcgatttatggttcaaaagcagctaatggagtcattgtcatcaccactaaacgaggcaaacaagaggggatgacagtaaactataatggaacattttctttccgttctcgtccccactatggcttatttaaccttatgaactcacaagaacgaattcaattcagccgcgaagcctttgctgctggagcaatctataacgaagcccctgtagcctctctaaacacatacgaaggaatcatgagtatgttttataacaaacagattactccacaagaggcagaaaatgcaatacacaaattggaacgtacaaataccgattggtttgacatcctaacacgcaattcatttagccataaccataatttaagcatttctggaggcagtgagaaagtcatttacaatgtatctttaggctatagtgatcaatctggaatagaaataaataatgatgcaaaaaaactaagcggacgcgtaaatttaggcattcaactacatcccaaggtacatgtagatttaagtttagtaggaagcattaataaaacctggggttatgcagcaaatgtaagtccattagattatgcgacagaaacaagccgctctgtgttggcttataatgaagatgggagcagacattttcaaagtatcagaactaattacgcttacaatgaaaaccctgtaattttaggatataatattttaaacgaaatcgatcatagttattcgctttacaaatcctcacaaataaatgggaatttaaatttttcatgggatattcttccatggttaaaatatgaatttgttggaggaatcaataataatgtcggaacatcagaggcctacgcaggagaacaaacttactatgtagcctccacatatcgtggttatgatttcggaacagaagcctatggctctaaaaaatacaaggcagcaatactcccatctggaggcgaattatataatggcagttctgatgtacaaggatggaatattcagaataaaattactttctccaaaacatttcaagaagaccatcgtctaaacgttttaatcggcaccgaggttacctcaaccaaaacagcaaacaaattacagaaaatgttcggctacgtaaaagaaagaggtgaaagtgttgtaaaaccaacgcctctaaatgaattaatacccatcggcagtagacctgctccaggtttaggattatttgaagatctatataatggtaacggatggttacgcaatacattaacagcaaatcaattttctgtatttgctacattagcttattcatttaaaaatcggtatgtaataaacgcaagtatgcgtaatgacgcttcaaaccgtttcggtcaggaccaaaacaagcgttttgacccaacctactctttcggagcatcatggaatgtagcacaagaaccatggctgcagaatatttcaaacatcgtaaatcaattcaatttacgagcatcctatggaattcaagggaataccgtaaattctatcagtccggaattgatactgaaaatggatgaaatcaaaccatattatggagactatatgtctaaaatttcacgcatacctaatcctcacttaagctgggagcgcactaaaacttggaactttggtttagatctccaaattattcaatggatttccatgaatattgaatactatacaaaaaaatcaaataacattgtaaaccaagccatcgcattggaatacgggcgtgtaggaacagaaatcaacggaggacgcattgtcaattcaggtgtcgaatacactttaaatatcaccccgattcgcaccaaagattgggcttggacaattggtttcaactcatcaaaaaactggaacaaagcaaagactcaatcaattagtgaaatcagtctgcaagactatatttccggttcctctgataaagttctgaaagaaggattcgccatttctagcttttggtcatatgatttcaagagattaaatgctgtggatggtagtccggaattcaaccgtctattccaagaagatgcacaaggtaacattctaaaagatgacgatggttctccgttattgagaagtgtaagtgaatacactgacatgctagtatattcaggaaaaatggaaccagatttcacaggtggactcacaactcgtctcagatggaaaggtttaacttttggagctaatttttctttattgctaggagccaaaaaaaggctgccgaatccctatcccaatttaggagacattccattatctaatgtaaatctaagcaaagacctgaccaagcgctggaaaaaaacaggcgatgaagcaaacactaatattccaggagtatataccggacgtgtagccaattactggagattacaagatggcaggacttacaacatgtatcaaatgtggggagaatcagacattatggttgccaatgcaaatttcttacgctgccaacaaatgtctttaacatggactgcaaataacaaaatttgtgcaaaaataaaagtaaagagtctctcaatcaatgctattatgaataacgtttttgttgtggctgacaaaaaattccatggtttcgatccagaattaggtgatagcgtacagcctaaaacatattcttttggtattactgttggattttaaaataaaaaactatgaataaaattatcaaatacacattcttgctttctgtgattttcatcacctcgtgcaatagttttttggaaccaaaatcacaaagcgaattcgtacctcagctaatccaatcactggatgaattattattaggagaagcctatatgggtccagggctcaatgacggaagatttttcagcgttttaggcgtttttgatgatgatgtaagcatacgtccaaactggaaggcagaaagttcagaagaagggaaagtaaaacaaatccgtttggcctattcatgggcaaaagacatgaaggaccagtttagcaactacaacacatacggagaagtatacaaaaaaattttaggttgcaactctgtccttgactacatggatgatgtacaaggcagcgagcaggctaaaaacaaagtaatggcacaagctcttgcactacgaggatatttttatttccacctagtaaatctatatggcaaaccctactctgcagacaaaaatgctttaggagtacccttaaagctaacctcagaaatgggaactagcggtatgccacgcaacacagtaaaagaagtatacgaacaaataatcaacgatttgcttaaagcagaacaacttttcaaatcattaccagcttcagaacaaaatttgcggaacaaccgaataaatttaccttgtactcaactactgctttcgcgcacttatttatatatggaagaatgggaaaagtcgataacttatgcagaagaagtcatcaatcaatatgattatgacattttagacttaaatacaattgcagaacccaacccgtacaattcccctgcatatataaactattacacatggagcaatcctgaggtaatattcttatttggtaatcaggctgatgtttgcggacttccacttacaagaatcacatgtgtagaagaatcaaaacctggtcaggtaaattataaaagctatcaacctatcattgcatcagaaagccttatcaatacatttgataaaaatgatttgcgaaaaactcattatttgatatgggaagaaattgattactacggtacacctatatatcgtcaaccgacaagcaaatatgaggttcaacgtcagtataaaatagactacggatatgaacggggagtctggggcactgcatttaaaattacagaggcttatctgaatgcagcagaagctgcggccatgctttacaaagaaaatagtcaaggcgaatatctagccaaagcacaaacattaatagatgcattacgcattaaacgcttttcacaagcaacattcaaaccgaccaccattagcgatagtgaaaaacttgtatcattcatccgggaggaacggcgcagagagctatgttttgaaaaccatcggtggtttgatttacgccgttacggaatggaagaaatcaaacatgtatggtatgatacttcaggagaacccattgaatatatcctagaaaaaaatgacccaggcttcactctccaattgccaaacgaggcttttgaacataattcaaatttgatacaaaatgaatctagaaaataatgtctaatagccaaatttaaaaaatatgcttaaaaaaatcaaaatatcgatatggacactgattctattgaatttcatctcttgtgccgataatgacaatataggtccaattgaaaaaattaattttctccaatttgattttcctcagggaaatgcaacttgggacaaagaaattgaacaaattgctaaagattggggtatgtatatcatctataaagatgtagacagcactcatctgaacagaatgtggacaacaccctattacaccgatcctatttatgtttgttccaaacctagctctgaagatattcaagtatatctgaatttagtacaaaaatggttattgggtagcttggacaaaaccaaagaagaagataaaagacaactgccgtattacctctatttagtcaacgatttaaatgacgggaatccccagtcacaaacttatcaaaaacgtcacattcaattcaaaaaggacggtttggactattggagtctaagctttactagcgaagaattgactgccggactgactccggaaatcattcatagtgttgcttgtgcattcagttatcccagtttaaaaatacgctttgaaacaaaagaatacaaaatagctcctgggtttgcagaaatgagtgactatgagactgaaatcggcagacgctatcttagttatgaacaatggaaagaagagaacccctatatgccagatgaaggctattacgataattggaacgttgatgaatgcgacaaagacgagtacaatgcctaccaaagcagaggatttgccgcacaattaggtgaggatttcaaacctatcaccaatataaacggagaacctacatacggggcccccacctggatgccgtggattataacagttgacgaatatggagaagaatatgaccgcaaccctggaccggtggccaccactattgaagaacgtgtattggaagactttatgaatatgattcgaacagccatgacttacttacccccaaaaatcaaagaattgtatcccactgatatagaagatcctatcaaacaagctggcaaccaaattatcatagacaaatacaatttagttatagaatacatgaaaaaaaactataacatagatttaaccaaatacgcagaaatcttaaatcaataaatacagaaacaaagaacgaagcaaaatacgttcttgcttcgttttatttcaacatataattcaatagaacgaatataacatgaaacgaataaaatacatccaactaggagttttactcacaggaataggtctgagcagttgctctgctcctagcgaatataaaatacaaggcactgtaaccggtattaaaaaaggggaaatatatatcatttcctacctcaataagaaagcagacactttggcaaaagcagatatcaaagaggagaaattcgagctacaaggtaaagtttccgatttaacaattgccaccctgcaaattcctgaaaaaggtataggacatgctactatctatttggaaaatactgactacacagtaaaattaattcctcagaatcttgaaatgagtgagataacaggagggggagaaaatcaaaaaattgcacacgaactattcttaatagatcaaaatctatctcaagcaattgatggcattcgcgatgaatatatcaaagaatcaaacgtcccacagagtagtcgttttcaggaactgaatatatacctggattcaatccaacaagttgctgaaaaacaaaaaaaagcgttctataaaaaatatgcaaccacatacgtagcccttaatcacatcgctcaaaatgcagaccgtatggatttaaaagaactaactgaaagatacgatttatttcctgatgaattacaaaatagtcccttaggtttgcaaataaaaacacaaatcgaaaaaatgcaaacattgacaacaggacaaattgctccagattttacagtacagacacctggtggggagtcttttaatatccactccatcaaagcaaaagctaaaatcattgatttttgggcctcttggtgtgccccttgtcgtgcactaacaccacaattggcaaaactccataacgaatttcacagtcaaggtcttgaaattatcggaatatcattggatgacaaaaaagaagcatggataaaagctattgaagaagagaatattccatggatacaaggttctaaattagatggattcaaacctagtaacccactaaatcaactatatgggattcatggcattccccacatagtactccttaatgcagacaaccacattattgcaacaactacagacatcaaaattttacgcgaagaaatactaaaattattcaaacaataacaccataaacaaacttacatgaaagtaattattggaatactcttgctaagttgcttcgcaggaaaggtagcagctcaaaatgcaaattacaaacgggcagaagaaacaaaagctttttcactgccttggaaatatgaccgtttaacaccattttttacagaaggaagtgatgacttttggtacagcctacaaaccaaagatggagaaaaatacttctatgtagacttgaaaaataaaaaggttgaagagtttatagaccctgtttatttagctacagagatggaaaaagccacaggcagaaaatacaaccctaaaaaaattggtctctggaaaattaatttcaaaaaaggggggaaaatattatcttggcgagatggcagagtaatattcgaatataatcgaataactagaaaattaaatcatacaaaactgccacctgaatctgatatgccaccaatacacggattctatgattcaggagtatcgcccgatgggaaatatcaagtatttgggaaaaatcacaatgcctatattcgcaacttggaagattcaacagtagtgcagctaacatttgatggcacattagaattcagctacatgaccggttggggagatgctaaaggagaagtcccattggcacctgtttggtttgaagattcaaaaaacttctatcttttccgtcaagactcccataaagttggtgaaatatcaagcatgaattacctaaaaggacgccccagcgcctacaattcacaagctgtattagcaggagactctatcgttttatatgaccagatttcattatttgatgttgaaacaaaaactcagaaaataataaaaatagataaatggcaagaccaattaactagagttctccattcggataccaagaacaataaactttttttggagcgcagaaccagaaggaataacatactagaagtttgcgacgttaatttaaaaacaggagatgtaaaggtaatcatacatgaagaagggaatccgtatattggaattgaattggcatcaatacatttcataaacaattacaatgacattatttggtggtcagaacgttcagggtatggacatttttaccattatgactgcgaaggccatttaaaaaatgttataacatctggggaatggactgcggggaggattgtggaaattgatgaaaaaaatcgtacaatcttcttccaagcttatggcattacttctggagaaaatcctagctatgccaaaatttgcaaagctaatattgacgggaaaagcaaagtgacaatattaacacctgaagaagcaactcatgaagtcatattttctccaagcaaacgatatattatcgatgcttattcacgcccggatctgccatgccaattttcagttagagatattcaaggaaaactaatcgcatcattaggtaaagtcaatttagatgatttatataaaaaaggttggaaaatgccggaaacattctctatcaaatcagcagatggagaaacagatttatatggcgtaatgtggaaaccttttgatttcgattctaccaaaaactatcctattatttcatgtgtataccctggtccacaaacggataacgttcctctgacatttggggtcggttcaaccaacgaagcattagctcaaattggatgtatcgtagttgcattcaatcacagaggagggattcctttccgaggaagagcatatcattcatttggatacaataacatacgcgaccatgcattggctgatgataaatacggattagaacaattaataaaacgccattcatacataaatgggaacaaagttggtatatacggacactctggaggaggaatgatgtctacagcagcaatctgtacttaccctgacttttataaagcatgcgtatcatcagcaggcaatcacgacaataacatctacagccagttctttgtagaaagccattatgctatcgatgaacaaattacccaaacgcaagacacaataaaaacttctaacggaaaagattctatcaagacaaaaacaaaggttgtctactcaacaaatttgccgacaaccatggaattagcaaaaaacctcaaaggtcatttaatgctcattgtcggaggaatggatggtaatgtacatcctgcgcaaacaattcgtatggctgatgctctgataaatcatggcaaagattttgagcttgtatttctacctcgcggacgacacacatatgacggtgtttcagagtggtattttgagcataagttacgttcacactttgccaaatatttacttggcgattttacaaattccggattctatgacatcaaaatcaatgaatatgatcaagtaatcaaataataagataaaactatgaaatcaaagtatgttattagctgcatttgcatgttactttatttaaacacatttgcagatggtgtaaaaccagcaaaagtaggagaacaatctccggatttccaatatgccgacaaaaatgggaaaatgtattctttaaaagattttaaagggcaatacgtatttctagatatttgggcaacacattgtctcccatgcaaagaagaaatcccttatctagaagaaattcaagaaaaacttaaaaagaaaaacattgcatttatcggcatcgctacagattgggacaaaaatgaatggattcaatttattgaagaaaaaggactaaaaggtactcaactaattatggataggaaatggatatccttcatgcatagttattatgttgcaaccattcccagatacattctattggacaaagaagggaaaatcatcaatttaaacatgccccgtccctctaatcctaaatgcttgaaaattctaaaatcattaaaaaaataacattcttacaaatttacagcaaggaggtgtgtcgtaataaggctgcacctcctttttgttcctaactattcataataatcgacaaccacccgactttcgcgcaccttcttacaatatgcactcaccgcctgatgcaaaggattgtttttataagaggtcaatgcagcatcatcttcaaaggtagaaacaagcacagcatcataagccgtttctgattcatttacgttaacaccaacctccaatgattgtatttcaggaatttttccaactaaatcttccaaatgctctttcatccaaaaagcattttctttacgtgtccgtccttctgtctccggcttgaacttccacatgacaatatgtttcagcataatttcaaaatttatctgacacaaatatataaaaaaatcagccactgaaagtgactgatttctgaggtcggtagcagagtcgaactgctttagacggttttgcagaccgttgcctaacccttcggccaaccgaccgttctgctgaattgcgttgcaaagatatgacaattttattaacttccaaaacaatctgcaaattatttttccaaagtgacacttgtacacttaatctgcccacccaaaggcggattcatcttagaaatttttaccttggcataagtcaattgcgggaaagaggcatacaaagcatccaacatccgcattccaacatgctccaacagatgcgaacgcaccatcatttcctttgcgattacttcataagccgtctggtagcttaaagcatcagcaatattatccgacgcagcaggataatcacactcataatgcaagcaagcatacacaacaaacttattaccgaccacctgttctgcttcaaaacaaccatggtaagcaaaaaactccattccttcgatttctataattccagtcataacaagaaaaacattaaaaattgactggcacaaagataaaataaaaaatgaaagggtcgatttctcgacccttaatcatttactaactactaacctaaaccatacaaacttatgaaaaacaatcttttttaaagacggtgcaaaggtactgacttttttaatataaacaacagtcaaaatgttaattacaattaaattattacttatcaccactctttattacacaatgcattgaaaaacatgcacataacaatcacatcaaaacaaatttgctcttacatcaatttttttcttcaaaatattttgcagattacaaaaaatgccatacatttgcatccgcaatcgacaagatagcacgggttcttagctcagttggttcagagcatctggtttacacccagagggtcgggggttcgaatccctcaggacccacactaaaaaggaagtcaatcacgacttccttttttattttaattagcattgctccagaatatccatcagctcccgcactgtcaattagtccagattatcagccattaagaaatttctcaaatgcagatgtgtaataccattatcatcattacgtataacccctggagtcattgaaattacatattttggataattatcttttatattacgaagatttccaaattctcgttctctggtttcgtcatttgcaatgatatatgaagcctgaatatagatccgtttagcacctgctctcttggtacaaacaaaatcaatttcacctgcttgtagttgtccgacattgaccttgtagcccaagcacatcaaatgctgatagatgatattttcaataatcttttctatatcgccttcacgagtgccctctgcctgggcgtttctcagcccatgatcctcaaaataaaatttgtcattactctcaaaaatgcgtttaccgtgaatgtcatacctattcaccctattaataatatatgcatcttccaaatattgtgtataatcgatgacggtatcaggagaaacagatgttccttgcgacttcataaacttggatatgctcgaagctgaaataatcttacctatgttgtctgctataaaacttgtcagtttttccatgaatggtacattgcggatattgtttcttgagattacatcctttaatagaacagtgttcaacacatccttttgatactccatcgcatcatcctcattcaatcccatcttaaccagtccgggaaggccaccaaactggatatacttagccaatgcatcgtctccgtcttgaaaattatgaaactgctgaaattctttatagctcaaagactgtacatgaatctctttatatcttccgccaataatcgtactgagttccttactcaacattttggcattacttccggtaacgattacttcagcatcaggttccgttctataacttcttacgctacgctcaaagtcttcaatttcttgtacttcgtcaatgagaatataattcatcttgcccgtttgataatgggcatcaatataagcattcaaatcctgataggtcttaatgtgatcaaaacccttcttttccttatctacatagatgacattgttattcttatccttcgctttgatatcacgaatcatcttcagcatataacttttaccaacacgcctctgtccggtcaaaacaataatcatgtctttaccaagatatttctccactttactcagataatgctgtctaactattattcccatgtcgtttatatttgataacattagcaaatgtactaattttatcgattataatcgataaaagctatatattatttaatttatcgagtataattgaagaatacacttgtagcaaactaattaacgaactattgaaatatcaaaacaatcaaactatatttgtagtattatgtggaaagaaaaattacttacaaacaaaaaggaggatatatttactgtggtgtcttacccctaaaggcaaacaatggctaaagtcaaatcacctgatttgaatattaagttgtcttccattactatgtattatttgtttttttgaagtatatcaaacttacaaaacaaaatagagccagcatcgtttgatactggctctaaaatccttattcacaaatacaattaaaacttatggaatgctctaactctataaggaatattttgactttctgtacctgtattaaatccaccataataaaagcctcccactcgaactctacccgttgcggaaagtgtcgatgacaaataataattcttggtaaacaaatcaccccaattgatttttatctcagatttcaaagttgcatcaaccggacaatttcgaatagcttcattaaaccggccaactgtttgctgctgattctccttaaaaagacatgaagcaaacatttccaatgtattggatgctggcatttcccaacccataattccatctttatttttatcattacaccatttcattgcagggaaagctttcagtgttgggtcaacagctaacacacctttcaaattcacagcagcatcagttttactctccgatgcaggccaatatgtccccattggagccgtgcaccactctaacttcacctcatccaacgaaacgatccacccatgctgtccagtttcatccacatcaacaacaataccttgaatacctttccgattataaaaatcaaacaatttataagtcggtacagattctatggcatctcccattaccaaatttccactatccttccaatctgaaatttcctttatcgtaatgaaacactctccctctttaatcaacacatccaaaactatttactttctctgtcatatattcaataaaggtgaagtaactatcacaaaagtattttttattttcacattatcaaaaaaaatattgtcctgactattttcaatggttttccataaaaattcacaacacacattcacatacaatcgtcccacttttctcctgcttctctccctctcaaatacatcacaaacatatatcaaatataacacaaatatatgacaaagataacagtctgttatctttgatataattttatgttgaaaataagttattgcaaagcgagagaagataatacgatctgccaaccaaaaatattttttattcaagcccacaaaagggtaaccaaatatttattagttttgtaatatgatactgcaatatatttatcacagcggatttgtcattaaaggcatgaactttgccttattgattgactattatatggacacccctcaacgatatgtccatgaacactttttacaatttcccggtaaattatatattcttgcctcacatgtacatcccgaccattttaaccctgaaattctcgaatggcaaaatgagcgaccggatatacagtatatcctttcttacgacataaaacgtaaactacgccatagcacagtaaatgctgttttcttaaaaaaaggagaaatgtggcaagatgaagaattaacggtacaagccttcggctcaacagatgtaggagtgtcttttctaattgatgccgaaggagaacgtatattccacgccggagatctcaacaactggcattgggaagaggaatcaacacccgcagaagtttgtctggcagaaaaagcctggcatcaggaactagatatcattgctaaagctaccgaccacatcgatcttgccatgtttccagtagatccacgtctaggcaaagattacatgaggggagccaaagagtttataaaaaaaatcaaggtccatcggtttgtacccatgcattgctgggatcaatacgacaaagccaatgctttccgcccgtttatcgaagccacaggagggcaatttatcagtattccagagagtaataatctgcaataaaacacaacaacaaatataaaagacatgaacatcaaagcaaaattcgaccattttaattttaatgttttagacttggacaaaagtatacggttctacgaacaagcccttggcttaaaggaagtgaaacgtaaaacagcagctgacggctcttttattttagtgtatatgggagaggaagagacaggcttctctttagagctaacctggttgcgtgaccggactgaaccgtacaatttaggtgacgaagaattccatctttgcatgagagtggccggagactatgataaaatacgggaataccaccgcgaaatgggatgcatctgctatgaaaacaccgacatggggttatatttcatcaacgatccggacggatattggatagaaattttgcccttgaagaaataaaatcatcttcttccggttcaaaatcttcaggaatactgcgctggagatgatatgtaatataaaaattccggcgcaggttctctaagtcatccagcaaatagtcataacgatcgtcctcttcgcaaaaatcttctattaacgcaattagggaatatttatcaaacactaaatccaattgttcagaatctccctgcggcaacaaattatagaaaaaagaattaaagctacctacccgaatgtagtctccccaataataaaaatcatacgagaacgtctccattcccggatatttcacatcaatatgtcttttataaaacactaattcatccccaggcaagaaaagcagtttctcttcctccaaaaggctacgcaccaactcttccaactccaaagttgcaaagggaatacgaaattcataatgatattctacatcatagacataccaagaaccttcacgaaacaccccttcgtaatctcttgattcactgcaagaaaatatagagaatccacagaaaagcagcaataaaatcttcaacgtcttcaacatcatgcactttttataaagtgacaaaaatacagataaaaaatggaaaatcactacatttgcatcagtacaaaccaatcgcaaccaatacatgaaacccaatactccattttccaaaaaaattctaatcataggagcaacctccggaatcggcagggcattagccatgatgtacctaaagaataatactgcaaacattgtcggcatagccgggagacgcactgaaaaactgaaagaaatatatgatttacaccctgcaagagtcaggtatcgccacatggatgtatgtacagaagaatgcacaacaatcatgcaagaactcttagatgaaatgggaggagcagatcttatcatttattgttccggaaccggaagccataacgaaggtcccgcactacatccggagacagaaatgccggcagtacatacgaacgtagtcggtttcaccagaatcatcatatatgcctacaactatttccgcaaaacaggcggcggacattttgtcaccatagcctccgttgccggaatacgccctttacgacaggcaccggcatacagtgccaccaaacgctacaaaatacattatacctcagcattggcagctatggcgcaccggaacaaagaaaatatccgtttcactactatcaagccaggatttattgacacagaactcctgcaccgaaaatatccgttcatggtcagtctggaaaaaggcagccggcttatttacaatgccattgaaaagaaaaaacgcagcgtaattcttccgggcagatggcggtggattgcacttttatggaaactgattcctttttgggaaaagttttaaaacaactcaatcgcagcaggtgccatataatgaccggtcaaaaaacgcacatggctcaaataggcctcatctgtaaaaattttggctttttgcggacaaacatgaatacatgcattacatttgatacagacacctatcacttgtgacggatgttccacatcgatagaccccataggacagacaatggcgcaacgtccacaagcgttacaatcatccgttgtttcgggcttggctttcaggaaacgagccggctttccatcttctccgagaggctggtaataacctccatagtccggagctccctgcccctttatatgcagctccggcaactctccgctcgccaaataattttgcacacggccggcaatatcagcagcaaaaccggtagccacggctaaatcggaagcattgggacgaccggctgccaacgtacaggcaaatgagtgctgaccgacaaaagcagcaccacccatgggagtaaatccgtgatgcagcaacaaatcatgcaattcaagcaaagcattcccatacgacctatttccataggatactaccggcagggccaaagcgccatacccttgccaagtgtccaaatatttcaataacagattcggtaaccgacctgcatacaccggcaatccgaccacccataattctccttttctcccctgcatagcctctattcttccaataggaagagtgaaatcattctcgacgcattccacctttaaaatcccggccaaagcagcagccaaatgtgataccaagcgccgcgtggtatgcgtcggactaaaataagctgcatgtatactctctatctccatgtcttcaactatcaatttcctttcattgctttttctatttgcttcggaatatccgtattatctaatttcccgctaaaatagccggcaccggcacctatggcatacacgggaacatatcctgcagaatgaccgccactcgtccaaccgaccatcgctatatcattcaatatttttacggccttcaccacaatcggttcattagaagcataaagactcttttccatttttactttaccgcctctgaatgtttccttataggtttctttcaacacctcttcctgacgttctgtcaagccgacagaatcccaaaaaccaaagttctttttcaataaatcctgcacatcttcccaggctactttattatttttttctctacgcaactgcttcacctgctctgtcacgcattcttcagatgctttctgatattttaaaacgccaagattcaactcatagcgtcccttgcccaatacgatgcctccggtttcatgatcagcagtcacaacaatcaacgtctcatccggatgcttttcataaaaatcaagagccttttgtattgctttctcaaaatccatcacctcacgaaaagttgtagccgcatcattattgtgacaggcaaaatctatttttcctccttcgaccatcagaaaaaagccgttatccgcatccttttcaaggaaacggatagcacaatctgtaatctgctccaatgtcaagtcatcagctttagcatctattgcataaggtaacgcttcagcagtcccttctttctgcaataacacaacttttgcagcactggcagataatgcctgaaattcctctacccctttagccacaacataaccggaatccctcaacaaatcaaaaacccccatttgtccggctttgccttccggccttaaaaaaccggaaccggcataaaaatcaaatccggctttgggtaagtctgttgctatttcataatacatgctgcgtttgggctggtgtgcataaaaagtggcaggcgtagcatggtcaatactgacactggtagttataccaacctttttccccaattcctgagccttcacagccacactaaacaacggggtctctttcaagctatccaaacctacaactccattttgggtcttctcccctgctgccaatgctgttccagccgctgcagagcaagttacagcattatattttgaaaaagtcgttgccatagaaacaaccgggaattgagtaaaattcaaagatttcaccccgattcgtccttccaattccgccatatacatttctgtaccattcacctgattcacccccatcccgtcgccaatgaaataaaacacatatttcgcaacttcaggcttattctgctgctgacactgaggcaacaagaaaattacaacacttattgccaaaaaccaatatacaatctttttcatgacaaaataaattagtgatgcaaagataaagaagaattgttgcattacgattacataagaagactcattacacatccgtcctgccaacgtatgcgtaataattacttgtctataatcttttttattccggcaaaaaacttacctttgcaatgattaagcaagagataacatattaatctataaaaactaaagaaatggtttattcacaggaagtgcaacacatgtgtgttgtcaagaaaggtccgaaccatggaccggcccccattccagaagaaggcaaatgggtaaaggcaaaagaaattaaagacatttcaggtttaacccacggaatcggttggtgtgctccgcagcaaggtgcctgcaaactgactctgaacattaaagagggtgtaattgaagaggcattggttgaaactatcggatgttcaggtatgactcactcagctgccatggctgcagaaatcttaccgggaaaaactattttggaagcattaaatacagacttggtatgtgacgccatcaacactgctatgcgtgaattgttcctgcagattgtttacggacgttcacaaagcgcattctcagaaggcggtctggttatcggcgccggcttggaagacttaggaaaaggtctccgcagtcaggtgggaaccatgttctcaaccaaagaaaaaggcgttcgctatctggaattggcagaaggctatgtaactcgtctggctcttgacgaagacgatgaagtatgcggatatgaattcgtacgtctcggtgttatgatggatcttatcaaaaaaggaaccgatgccaacgaggctctgaagaaagccactgcaaactatggacgttttgccaatgcagctaaatatatcgacccacgtcaccaataaaaaaggaggaacatactatggcaaaaagagaaataaaatttgaaagtcaggatcgtcgtatcaatcagatcaacgcagtattgaactcctatggaatcgcttctatcgaagaggcagaagctatttgtgcagaaaaaggaatcgatccttatttagagtgcgaacaaactcagaacatttgttttgaaaacgcaaaatgggcttatgttgtaggtgctgctattgctatcaagaaaaattgtgtgcacgcagcagatgcagcagaagctattggagaaggcctacaggcattttgtatcaaaggttctgtagctgacgatcgtaaagtaggtttaggccacggaaatctggcagcccgtctgcttcgtgaagagacccagtgttttgcattcttggcaggacacgaatctttcgcagcagctgaaggtgctatcaaaattgcagaaatggcaaataaagtacgtaaaaatccgttacgtgtaatcttgaatggtttaggaaaagacgcagccatgattatttcacgtatcaacggctttacatacgtacagacagaattcgactattttacaagcgaactgaaagtggttcgcaccaaagcatactctgacggtcctcgtgcaaaagttaactgctatggagcagacgatgtacgcgaaggtgttgctattatgtggaaagaagatgtagacgtatccatcaccggaaactctactaacccgacccgcttccagcacccggttgcaggaacttataaaaaagagcgtgtattggcaggcaaaccttacttctctgtagcatcaggtggcggtacgggacgtactttacacccggacaacatggctgcaggtccagcatcatatggtatgaccgatactctgggacgtatgcactctgacgctcagtttgcaggttcttcatcagtgccggcacacgttgaaatgatgggcttcttgggtatgggtaacaacccgatggtaggagcaacggttgctgttgccgtatctgtagcacaggcattagcgaaataatatagagattcctctataataaaataaaatcccatggttaacatccatgggatttttcatatataaatattaattttgccacaaaattccaaaacaacatgaatacaaaagctaccggctatattttaggcgcagttgcagcggctacgtatggaatgaatccattgtttgccttgccactttacaaagctggcatggatccagactcagtactatttctcagatacctgttggcaatacctattctcggcatcatgctgaaaagcagaggacgcagtttccgtttgcagcgcaaggaaatttttcctttaatcatcatgggattgctggtagccatctcttcactgacacttttccaaagctacaacttcatggaagccggtattgcttcaactcttttatttgtataccctatcatggtagctcttatcatgtctgttgtctttaaagagaaactgacattgcaaaccatattatgtatcggtttagcattaggcggtattgccatgctttatcaaaacggagaaggagccacactcaacttgacaggcgtgttgcttgttatggcatcagctctttcatatgccatatacattgtcggagtaaaccaatcaaccctaaaggatgtagccaccttaaaacttactttttatgtattattattcggtctcagcctcttcctggtaagagttgacttcggacgcagtctacatattgtcaacgaatggtacacttggcttaatctattagcattagctgcatttccaactgccatgtcattcctttgcacaaccagagcgatacaatatataggttctacaccgactgccattctcggagctttagaaccggtaaccgctgtttttttcggagtattggtattcggagaatcactaacaatgcgtattgtttgcggaatcattatgattattgttgctgtaaccttgatcattgccggtagtaatatcacaacagcacttgttcgattcagaaaattatttccacgtatttacaaatcaaagaaataggctcaaccatataaaccgatttatatgaaacgtactttcatatataaaatattacagacggcaatcgcattcatactactctatgcatgccagcaagacgaaattatccaccacgacaatgatacaaacggattaaaaatcaacttgtcgggagaaatcgaccaagtggcaataacccgcgtaaatgatgacggattctgcgataaagacgaaatgggtgtctatatcgtagattatgaaggtggtgaaccgggcaaattgcaactgaacggcaaccgggccaccaacctcaaacatacctttgatgaagcggcacacaaatggatagcggcatacgatgtatactggaaagacaaccagactcccgttgatatatacggatactacccgctaggaaatccggaaaatatagaagcctacacctttgaagtacaaaaggaccaatccaaagaagctgttaacggcatgatgggcggatatgaagccagcgactttctatgggggaaagcacccaaagtggcacctacagagctagtcgtcaagattgctttccaccataagatgagcagtgccagaatcactcttgttgaaggagagggatttacagaaggagaatgggccaacctacaaaaacagatggttatcagcaacacgaaacggaatgccgccatcaatttggagactggctctgtaacagctatcggcaaaacatctactaccggtattgtaccttacaaaaaaggtgatgaataccgggcaattgtcgtgcctcaaaccatcaaagcaggaacaaaactgttcaacatcagtgtagggactgtcccctatacattcagcaagacagaagactttacatacattccctcgaagatgcacaatttcagcatcaaggtggataaaaaggctcacgacggcacttatgtctttaccctcatcagcgaatctatcacagcctgggaaaacgaccccgtcagccacaatgcaacggcaaaagaatacattgtcattgaatccaaagccggacaactgaaaaagtgtatctctgctgcaaaaaaagatttccgaaaagtccggaatctaaagattacgggagaaatcaacgccaatgatttctctttcatgaaagattcgatggaaaaattacaggcattgaacctaaaagaagtaataataaaagccagtacaagcggcaagaccggcaaagataaccagattccggatcatgcgtttaatcaaaaagaatctttagtctaccttaccttgccggataaattagagtccattggcacacaggctttttggggttgccaatctttaagcggttcattaatcataccggaaggggttactgaaattcttgacggagcctttagtttctgtcatgcattatcaggacggttatcactaccttccactctgaaaatcatagaattaggagccttttacgaatgcggtttcatttgtgaacttattattccagaaggggtagaactcattggtggtgaatgcttttgtagatgtgaaggcctacatggagaacttaaactaccaaataaattaaaagaattaggatctagaacttttcaattttgctcaaacttgagcggttctctaaccattccgcaaaatataacccaaattcccgaatatgcatttgcaaattgtggcttcaatggaacattaacactacataatggcatcactaatattgaagaagaggcatttagtttttgtcacttcaaaggagaattagtattacctcaaaaactgacaaccataaagccagcggcatttcaacattgtcaattttcaggagaattaaagcttccccaagctcttatatcaattggcaacggagcatttgcaagcaatcaacaattatcaggaatcttggaaattcctgataatgttcagagcattggctctacagcttttgctgattgctgcaaactggaagggattatttttcctgcttatttagaatctattggtacagatgcttttaacaatgactttggaatcaataaaatcatctgtaaaggacttatccctccctacctattacctggagttttcaatggaatatccaaagaaaatttctctgtagaagttccggaaacagctattgaacaatatcaaacagcaatcggatggaacgccttcaaacacattgccgcacatcatgaattggtttgccgtcccgcaaccctcacaacccttaacactcaatgcacccgcagactcattctgaatgcagaaggagaatgggaagtaatcaacaaacctgagtggtgcagcctttctgccatgagcggctcgaaaaaaacagaactaaccctcaccatccactacatgccacaaggctcgccgatgcgtgaaggcgatatcgtatttacattgaaaggtaaagattacacctctaaatgccatattacccaatatgactatgaatatgatgaagacgaaatcatcacactgcaatcccattcgaaaggtcaaggagtaaacctgatattcattggtgacggatacgatgcaaaagatgtatcggaaggactctacctacatgacatgaaagagcaggtggaacacttcttcaatatcgaaccttatcgcacataccgcgactacttcaacatctatacagccattgcagtatccccggaaagcggtatcggcacgactaactctatccgctatgcaaagtttgaaacaacctatagtggtttaggagtttttaaaagcaattacaagaccatattcaattatgctctaaaaatgccgactgtaaataaagacaacctgaatcaaagccttatcattgtcacccccaacacatcagattatggcggtagctgccaaatgtgggaagatgggtccgccattgcattctgccccaagagtacctacgactatccattggatactcgcggagttatccagcatgaagccggtggacatggattcggaaaattggcagacgagaagattgccatcaatggttttatccccaatgacgaaatcgtaaatattaattcaaagcatgcattaggctggtatcaaaatatttcaccaacaggaaaaatgcataaagtcccttggtcacatttgattttcgacgaacgctacagcaatgatgttgacatattcgaaggtggatatatgtattcccgaggagtattccgctcagaacagaatagctgtatgaacaattgtatcccctatttcaatacaatcagccgtgaagccatcgtcaaacgcatcatggaatatgctggagaatcctactcatttgaggaatttgtcaaaaatgacaaagtagacaattctatcagcacacgtgcattaaaaggatacaaagatgtccatgcccatagtagcaaccatgaacctattatcaacaatgggaaacctgatatttaaggcctatgcacccttgcaaactttatttatacattgggaaacaatacttttgttgcaaaataattcaagtttaacaaaatacctcaacaagttgtcacaacagaagcagatttctattgtcaccatcttaatctgtcaaaatttcaagataggtttgcacctacttagaagtaaaactgatcagagaacataagaataactagaatactatgaaaatacattttatttataaaacattgcacactgcaatcgtattcatactactctatgcatgccagcaagacgaaattatccaccacgacaatgatacaaacggattaaaaatcaacttatcgggagaaatcaaccaagtggcaataacccgcgtaaatgatgacggattctgcgacaaagacgaaatgggtgtctatatcgtagattatgaaggtggtgaaccaggtaaactgcaactgaacggcaaccgggccaccaacctcaaacatacctttgatgaagcggcacacaaatggatagcggcatacgatgtatactggaaagacaaccagactcccgttgatatatacggatactacccgctaggaaatccggaaaatatagaagcctacacctttgaagtacaaaaggaccagtccaaagaagctgttaacggcatgatgggcggatatgaagccagcgactttctatgggggaaaacacccaaagtggcacctacagagctagtcgtcaagattgctttccatcataagatgagcagtgccagaatcactcttgttgaaggagaggggtttacagaaggagaatgggccaacctacaaaaacagatggttatcagcaacacgaaacggaatgccgctatcaatttggagacaggctctgtaacagctatcggcgaaacatctactaccggtattgtaccttacaaaaaaggtaatgaataccgggcaattgtcgtgcctcaaaccattaaagccggaacaaaactgttcaacatcagcgtagggactgtcccctatacattcagcaagacggaagactttacatacgttccctcgaagatgcacaatttcagcatcaaggtggataaaaaggctcacgacggcacttatgtctttaccctcatcagcgaatccatcacagcttgggaaaacgaccccatcagccacaatgcaacggcaaaagaatacatcgtcattgaatccaaagccggacaactaaaagagtgtatcatcgcagcaaaaaaagatttccgaaaagtccggaatctaaagattacgggagaaatcaacgccaatgatttctctttcatgaaagattcgatggaaaaattacaggcattgaacttaaaagaagtaataataaaagctagcacaaacggaagtatcggtaaagagaatcaaattccggatcatgcgttttattatcctaaccttgatcgctctcttacctatcttatattaccggataaactagagtctatcggaatatatgcctttgcaaataattatgcattgagcggttcattaaccataccggaaggtgttacagaaatactcaacggagccttcagtgaatgcaaagctctaacaggaaaactgacattaccctctactctaaaatatatcggaaatcctgaatacggcgatacaggcgttttcaacgaatgcggttttacatgccaactcatcatccctgaaagcgttgaagtcattcaacagatgtctttctacagatgcgatggtctatacggtgaactcaaactaccaaacaaattaaaaaagctaggtgcctatgcttttgctaattgtgaaaaccttatcggttcattgtccattccccaaagtattacccatatccctgcagaagcatttgccggctgtaccggtctaaatgggaccttacagctacacgatggtattacatccatcaaccgttctgcttttgccaattgccattttaaaggtgaattggttttacctaaaaaactaaccgtcattaacgaattaacattcagttattgtgatttttccagcatcatatttccagaatcgcttgtttctatcggtgaaggagcttttcaaggaaacccacacctcattggtacattaaacatacctaaaaacgtacaaaacattggccgctctgcattttgggaatgcaataatttgaataaaattatattaccaagtgatttagaaagcatccataatcatgctttcatgaattgtatttataaccatagaacaaccaaaactaatcagaaatatccgagtgtaaatctttaattaccagcatattctaaaatttaacacttttcggttgccatttgtcgcttcccaaatttccacatatttttgagacgtatttctgacgtggagaatttgcggggcttgttttttgtcacaccgtgcagacagttgacaagggtttacaaccgtttacgacaagcgacaataaccgccccgatatgcggaaacagtcacactgtgtagaaaagcgacaatggttgacttccgttcacatccgtttaccatttcagagatataggattgaagaaatgaaccattaaacgataaaacggtatgaaagcaaccagaaaatgcagtttttgcggcaagtcctttgtaacccgaagcggtatgcaaagatattgcagtgaggcttgtcaggcagaagccaaacgagccagagtgatgcagaagaacaacctcttcaaagtcgcccaacccttgatggagatacagcatcaggagtatctcaccttttccaaagcagccatcctcatgggctgttcccgacagtacatttacaaacttgtagccatcggcaagctgaaagcctcacgcatcagcaaccgcatggcattcatccgcagagccgacatcgagcagatgttggagggcaatccctatcaccgcatcctgcccggcaacacctccacaccaaggaaatcatcttcatcttccttacctgccaaaagagaaaaaagggaaaaggaaagcgaagaagtgttggacttctattcgggcgaggaggtgatgtccctttttaaggtaaagcagtcatggctttacacttccgccaagcgtaaccatatccccatctgccgtatcgcaggaaagaactattacagcaagaagcatattgacgagtttttcggtgtggcagttgatattagcgaaattaccgactggctactgaccgaggaggtggaggaactgttcggcatgaagccgaccgcactccgtgcctacacctatcgccataagatacccactaaaagagagtacgggcgtacctattactccaaatcacatttgaacgaactccgcagaactgaccttgtgaacgatgaacgctactataccgttgagcaggtgcagcaaatctatggtctttcgtcagccaacatctgccatatcgtcaaggtgaagcacatcgaaaagataaaggtgggtgtgaaaaacctgcttttgcgctcagatgtggagcgtgtcatggctgaaaggaacaaataaccgtgaaaaatcgggattatcgaaaattatttcaaaatgatgtatcgtggaggtattcacggatatttcacgttgttcctttgccatcggaaacatggatacaactccaaaatgtatacaaccaattaaaacataattattatgagtaaatgcaaaacagttaccttgcgtaagcgcaagattaagaacgggacacagtattcactatgccttgactactatcccggctaccgtgacaatgtcaccatgagagtgattacacgtgaagccttaggaatttacatcttcgccaaacctgcaaaccagcaggaacgggacttcaacgcacgcatgatgaagaaagcggtcatcctgcgcaaccagcgctacgaagccattttcaatgaaaacaacggcttttttgacaagaccaagatgaagggcgatttccttgcctatttcaaaggactggctgaccgcaagaatatcaagtggcagcacgtatacaagcatttccagcggttcgtgaacggcaaatgcacctttgaggaggtggatgtggatttgtgccgcaagttcatggaatacctgcttgatgcaccccaatccatccacaccaaccaaaagctgcacatcaactccgcagcaggctattggtcaactttccgtgccgtgctgcacaccgcttaccgtgacaggaagataaaggagaacccaaacggcttcttagaccgcatcgagtgcattcccaccatcagggagcatttgagccaagaggaactgatacggcttgccgaaacaccctgtgaggaggaggtcttgaaaaaagcttttcttttcgcctgtcttacgggactgagaaagagcgacatcagacagctcacgtggcagcagatacaaccatacaccaacggcaggatgttcgttaccacccgtatgcagaaaaccaaagaaatagtgcataaccccatcagtgatgaagcctatggactgctgggagaacggggcgagggacttatctttgaggatttcaaggacaagatgctgcaaggaccactccaacggtggctcacggcagcagggataaccaagaaaatcacctttcactgtacccgccacagcttcggaagcctgcacgtggaaatgggaacggacatggctgtcatccaagcctatctcggacataagaacattaccaccacacaaatctattccaagatagcagcgcagcagatgtgtcaggtggtggacaagataaccttgaaacgcaaggaggcataaatgtctcacattgacaggtattcagaggggcggttatggctacaaggctataatcgcccctctatgtttttggcttgatgccaccatttataagcccctcagagtatgaaacagagtatgatatgatgacatttcgtgaaatacattgaaaaagaccgttctaaccgcaaataacgggcagtaattgggaaaaatagcattaactttgcacaaaataatacaggaacattcaatctctcaacgaaatatggaatcatcaatcaaggacaaatacatcatcttgggctttgtcggcttcgccatcgtcctaatatcttccattgccacgctggtaatagcggacagcttcaaccaagacaactttgtcaggtggatagtattcgtatgctgtaacctgttgggatggttgctctatctctcctttcagacacttatctttgatacatacgaaatctacaaaatcaagttcggcaagaaagaaacgattgccgaagccatagaggtgcaggaagaactgtcacaaaatacacttgaagaagccacatctgtgcctggacctacatcagtccctgagcctgtacccgaatcatccccgacaaaagaagagacacttatccaaacacaaccgatagagcttactatcgccccggatcttcacgaaaagaaccgtgccaattacgcaagcagagagcaacgggaaaaggaagagcgcatccgcatggtcatggagtattgccattattacctgcctcgcattgccgaccaagaaaccgtgaaccacatctgtactgaggtggacaaatggatgaatcttaacacttataccccgaagcccatacaaagaccgtttaccaaagacatcaacaacattccactccgtcacttcgtatggaatatctctgagcgtttcctgtacaagagatactacaatggggataaccgtgccaagttcatcaaagcccttttcccgaaatcgtttgctgatacagacttatcaaccatcaagaatttcaaggtagagccgttaaagacggaaattcccattgatgaacccgaaaacggcaaacttgatttccactatcccgaggattatgtgcggaattaggataatcacgacaccaacgacaaccatccggtaactcataaccgcctgttttacatcgtttcccgagtaattttacccgtcatttatggctgggcttaattattcgggaattattttgcaatgacgtgtcgtggagatattcacggatatatcatttcagtcctttgcgccaagtcttacaaaagagacgagtacgcgaatggaaaaatcaattcttaccttcaacgacctccccgaggttgtcgctcagcttcgagacgaagtgatgagcctgaaaagcctgctcgccgagcagcgcagtgtgaacaatgccaaaacggtggacacccacgtgcccatgtctgtggacgaggcagcagagtatttaggtatccctaagggtacgctctacatgaaactgtcagaagggacaatccctgccaccaagcccggcaaacgctattgcctttaccgtgacgaactggacaagtggctggaaaccgcccgaaagaatcccataccgttgtcagacgaggaactgaacaagtccttatcctcttcccaccgtcgcaagcccaacccacgtaactggtgaatgatatggaagaggataagaactatatcaacctgatacgtggcgacctcacaaaagcatcccaagcgcataacggtatgcccgacagtgtaggcatgatgaatatcaagacggcaaaccaaaccattcttgaagcatcgttattgcctacgccccgtgcgctgtgggacagcttttggtacgagggggaactctcctgcttgtttgccgattccaacgtgggcaagtccatccttgccgtgcagatagccgaccgcatcgcccgaaccgacaatgtgctgtatctggactttgaactgtccgaaaagcagttccagctccgctataccaacgagcatggagagctctacacctttcccgacaaactctatcgggtgtctattgactgcaaccagcttttggatgccaactttgaggaagctatcataggcggcattgaacagatggctgtgcagaccgactgcaagattttcatcattgacaatcttacctacctgtgttgcgccatggagaaaggcgatgccgcaggacggctgatgattcagctgaacaatctcaaaaagagatatgcgctctctatccttgtcctagcacatacgcccaaacgctctttggattgtcccatcacatccaacgaccttgccggaagcaaacggctctacaatttctttgacagcgtgttcaccattggaaaaagtgcccaagacggagggcttcgctatgtgaagcagcttaaagtgcgctatggcacgttctctcatgatgcggataatgtaatcgtttacgagattgacaaggtggatgctttcttgcagttcgtgttcaggggctattccacggaaaaggaacacttgaaaaaattgggcgacaatgaatcaagccaaagggattgccaaattctgcaactctcccaatcgggcaagtccgtcagggagatagcctcacaggtgaattgtggcaagtccaccgtaaaccgtatcatccagcgcagcaaagagagtaaaaacgcaggtgtcccaagtgtcccactgtcccaacccttagagtgtgggacaatgggacaggatgggacagccgacaatcaaccatcaaaaacggactaagctatgggcaattattcattacagaagtataaaggaacggcaacacggcatacctgccccaaatgcggagacaggcattctttcgtctattacgtggacgaaaataatgtgccgttgcatccatcggtcggcagatgtaaccacgaaagcggttgtgggtatcactacactccgaaagagtattttcaagagcatcctgaacacagaactaccaatgatttctcttttgacaggcaaagagcagagcagaagaaagtgaagcagcaaagtaagccgacagccatcggctatattccccctcactatgtggagaagtcgcaaagcgagcgtagcaatttcttccgtttcctcttcacactccttacttcctactatggcgacaaggcgaaagaggtgttgaagcggttgttggaggaataccgtttgggggctacccgtgacggctctgttatcttttggcagatagacaggacgggcaaggtacgcacgggaaaggtgatgcagtacaatcccgaagacggacaccgtatcaagggaggacagacatcggcagtgaactggatacacagcatattgaaaaagcagcgtgtgttggcagaggattggcaactatcccaatgccttttcggggaacacttgttgaaaacgcatcccgacaaggtggtggtcttggtggaatccgagaagagtgccgttatcggttctgctatcttccccgattatgtatggctggctacgggtggtaagagtcagatgagagaagagaaactccgtgtactgtcagggcgaaccgtgcttctctttcccgatgccgatgcttatgccgagtggaaacagcgagccgagagcatgtacttttgtaaggtggtggtttcggacatcatcgaaaggaatgccaccccgaaacaaaaagaagcccatatcgacatagccgattggattatctttcagatacgggagggcaaggtgatgagtacagccaaccacttggtcgaggctgagagaatcctccagcggatgatagagaagaatcccgtcctgcaaaaactgatagacgatttagaccttgtgctggtcggtgcatctccaatcggcaacgatgatgaaaaacctccctgacggaggagagcggaagccgtaggctggagtttgcagacaatggcttgccattgatatagcccactataactacacgctccgcttacgtagttgtgggctctcccgaggggattagggttttaccctaatgacccactcagggcgtttctcccctgagaacccagagcaaagagtgaccctctctttgcaatctccgcttatgggttgcacccctaagaaccccatgcgtttacggacagcggaaaagcaaacaataaagtacaaaccaaaaaacaagtatctatggcaacaaaatcaagcatacatatcaagccctgcaacatcgcatcgagcgaggctcacaacaggaggactgccgaatacatgcgccacatcggagagtccagaatctatgtcgttcctgaactatccaccgataacgaacagtggataaatcccgacttcggcagtccggatttgcggatgcattatgacaatatcagacagatggtaaaggaaaagaccggacgtgccatgcaggaaaaggagcgtgaacgcaaaggcaagaacggtaaaatagtcaagattgcgggatgctcccccatacgtgaaggagtgctgcttgtcaggtcggacaccacactggcagacgtgcgtaaattcggtgaggagtgtcaaagacgctggggaatcacaccgctgcaaatcttcctgcacaaggatgaagggcattggctgaacggtcagccggaagcggaagacagggaaagcttcaaagtcggggacagatggttcaagccgaactatcatgcccatatcgttttcgactggatgaaccacgaaacaggaaagagccgaaagctcaatgacgatgacatgatgcagatgcagacccttgcatccgacatcctgctgatggaacgcgggcagtcaaaggctgtcactggtaaggagcatctggaacggaacgactttatcattgagaagcagaaagctgaactgcaacgcatggatgcagccaaacggcacaaagaagaacagataaatcttgccgagcaggaactgaaacaggtgaaatcagaaatacgcactgacaagttaaagaagacagccaccacggcagcgacagccataactagtggagttgcttctcttttcgggagtggaaaactgaaagaactggaacgtgccaacgaaaaactgcaagacgaggtttcaaaacggaacaccaatattgaaaaattgcagagccaagtacagcagatgcagaaacagcatgatacgcaaatccacaatctcagagaaatgcacaggcaggaacttgacatgaaagaaaaagaactgtcacggctcgccagaatcatagacaaggctttcaggtggtttccgatgttcagggaaatgctgcgcatggaaaagttttgtgccatgctgggattctctaaagaaatgactgaaagtcttatagtcaaaaaagaagccctgaaatgtagcggtaaaatctattccgagcaacacaggcggaactttgatataaaggatgatattttaagggtggaaaatgaccctgacgatgaaagcaggctgaacctgacaataaacaggaagccgattgccgactggttcagggagcaatggcacaggcttagatatggagcaagagtgccgcaacaggaagaaagaaaaagtagaggattcaaattataatagaagcaatttgattagtaatctaaaagcactccgataacgattagagtgcttttagattgtttatcattaattatcaaagcaagtgcagtttaagattttactgaagtttgcattaataaagaatatactacagctgatatatgcgcaacatattgtgacgcttgtgattcatttcccttgaaatccttaacaaataccgctaaggtataactgatattattaggcagacatatataggcaacatcattgtgagctgcaagaacaccattttcattaacattacctgaacctgtcttatgcgctataacaaccccttctttatcaagaagtggagctgctatcctatctacacctgttttgcattcttttaacgtattcttaatgaaactttgtttctcatcatcgataagaccttcagtaaacaaacgattcatcaacattgcagcaccaagaggagatgtatagttagagtaagccttgttatggtcagccgacatttcctcttccgtataagctatctgaaaacttgaacgaggaatgagtgtggctataaaactatctgtttgagcgacattaaccatatccttaaacataaggttgcttgcattgttgtcactctgagtaagagtataacgcagcaaatctctcactgtcaatgatatgactggccctgaataatctttcagcataggactccaagtctttgggtcaagtttatccctatttatatttactaaggtatcaagtgaaattcctttattgtcaaagtcattacaaagagctaatgcctgatgaaccttaaacacactcatcataggataaacactcttattattgaccttaaccgtatctctgttattaacaataaccgccacaccaatttcgccaggacaagctgagacaatttgagaaatgctatcagtcaaaacatttgttaaaggaggatttgcgctatcttttgtcgctgatttatggaacaatgaaaataccaagatgaaaatgcaaactaaagctatactcaaaactacgatttgtttttttctgtttttttccatgtttatattatttatatttgtttgacgagaatatctttatttgccgacaaaggtacataactttacggaaaaatatgtttctaaaatatataaaaatatataaatagacagctgtggggaaaatgtggggaaaaattagataattaaaaaggctaaatgactggaaataatcacttagccttttaatccgtacccagacccgtacttcgtaattgctgcgcccatcattcaagactgtcaaatcgggtctttcctgtcaagccaatgatgcctatgcgtatgccaaacacatggattacggatttctcgttccgtgaacaaacactttatccgcaactctgctatgtggtgtattggcttaactccatttctatgggcaacacttttgttgcagatttcaagcagcttttatcgaaatacccatcagtaagaactcgtttattaggctttcctcataattgggaacaagagcctttgtggagataaaataattgccctgtttcttaaaaagcactggggcaaaccagctccgtctttaattgtttccaataaatggattgtttcaagcccctatagaaagagaacaaaaattcctgtgtgaaaattaatctacgacaaggagcaagcaaggagcaatatcaaacaaaaatcaatacctttgcagtacatatgagatagaccaaaacaaaagtggaatatcggaaacgaatagcaaggaaaagagaagaaacgacccaagttgatgtcctttttgagttaataatcaataaaagcgttaaatcttcaccttttagaatgtgcaattaaaaataacaaccatatttctgacttattatctataaaatattgagtaataatcggttgtaaatactcctatttgttttaacatcagccgtattatttgtaaaggaactatccctccacatatacaaagcggcgttttcaatggagtgaacaaagacaacttcactgtagaagttccagaaacggccgttcaacaataccgtacagcagctggatggaatgatttcaagtacattaccacgcatcatgaattagtatgtagtccagctatcgccaatgctatcaacacacaatgcacccgcaaactagtcctgaatgcagagggtgactgggaagtaaccgacaaacctgagtggtgcagcctttctgccatgagcggctcgaaaaaaacagaactaaccctcaccatccactacatgccacaaggctcgccgatgcgtgaaggcgatatcgtatttacattgaaaggtaaagattacacctctaaatgccatattacccaatatgactatgaatatgatgaagacgaaatcatcacactgcaatcccattcgaaaggtcaaggagtaaacctgatattcattggtgacggatacgatgcaaaagatgtatcggaaggactctacctacgtgacatgaaagagcaggtggaacacttcttcaatatcgaaccttatcgcacataccgcgactacttcaacatctatacagccattgcagtatctccggaaagcggtatcggcacaatcaataccatccgctatgcaaagtttgaaacgacatttaccggtggagtaggattaagatgtgactataatgcagtatttcaatatgccttgaaaatgccgactgtaaataaagacaacctgaaccaaagccttatcattgtcacccccaacacatcagattatggcggtagctgccaaatgtgggaagatgggtccgccattgcattctgccccaagagtacctacgactatccattggatactcgcggagttatccagcatgaagccggtggacatggattcggaaaattggcagacgagaagattgccatcaatggttttatccccaatgacgaaatcgcaaatattaattcaaagcatgcattaggctggtatcaaaatatttcatcaacaggaaaaatgcataaagtcccttggtcacatttgattttcgacgaacgctacagcaatgatgttgacatattcgaaggtggatgcatgtactcccgaggagtattccgctcagaacagaatagctgtatgaacaattatatcccctatttcaatacaatcagccgtgaagccatcgtcaaacgcatcatggaatatgctggagaatcctactcatttgaggaatttgtcaaaaatgacaaagtagaacaacccaaatatagtttatgaaccattatgaacttgatttatgttttataaacaagtatttttgttacaaaataaattaagttctacaaaatatcaaaaatcatgaaattctggattattagcgtattgttagcaagtattttagggtgctcaaccagcaatactgaaaatggtgatggttcaataacctctgaaccggaaacttcaaaaattaaaatccaattaaatgcaggcattgcaacccgagctacagaaacagcattcgaaaagcaggaccgaatcggtttatatgtagtaaatcaaaatgaggggcaagctggagaattgctgcagcaagggaatcatgtggacaacatgcgctttacctattctgacaaatggactcctgatgaaccgatttattggaaagacggcacaacaaaggcagacttctactgctactatccttatcagacaaatcccaatatccattcatgttcattcagtactcttacaaaccaaacgactgaagaaaattacaaagccagcgaatttttatggggcaagactcctaacgtctctccgactgaaattgcagtagacatcaccactcgacatgcgttcagttgcgcacaaatcaaactactccccggagacggattcaccgaagaaagcttaaaaaatgcagctatccaattacaaatcaatcatgtcttgcctgatgcaatcatcaatctttccaacggccaagcaactgcttgcggcaacccgaaaagtatctcaccgtggtttgacggcacctactacaaagctattatcgttcctcaaaccattgacaaaagcgatttgattgttatcaaaatcaacggaaaagattatactttaacacaaggacatacgttcgaagcaaacaaacgtcacaaattcactgtgaccatcaacaaaaccggtagcggtatcaatgtaggcatcggcaaatgggaagatgacccaatcgaccatggtggtaatgcagaataactttaaaagcgcaagattatgaaaatacattttattcataaaatattgcaaacggcaattgcattcttactactctatgcatgccagcaagacgaaatcatccgtcatgacaatgatacaaacggattaaaaatcaacttgtcaggagaaatcaaccaagtggcaataacccgcgtaaatgatgacggattctgcgacaaagacgaaatgggtgtctatatcgtagattatgaaggtggtgaaccaggtaaactgcaactgaacggcaaccgagccaccaacctcaaacatacctttgatgaagcggcatataaatgggtatcggcatacgatgtgtactggaaagacaaccagactcctgttgatatatacggatactacccgctaggaaatccggaaagcatcgaagcctatgcctttgaagtacaaaaagaccagtccaaagaagctgttaacggcatgatgggcggatatgaagccagcgactttctatgggggaaagcacccaaagtggcacctacagagcggatcatcaagattgctttccaccataagatgagcagtgccagaatcactcttgttgaaggagaggggtttacagaaggagaatggagcaacctacaaaaacagatggttatcagcaacaccaaacggaatgccgccatcaatttggaaacaggctctgttacagctatcggcgaaacatctactaccggtattgtaccttacaaaaaaggtgatgaataccgggcaattgtcgtgcctcaaaccatcaaagcaggaacaaaactattcaacatcagtgtagggactgtcccctatacattcagcaagacggaagactttacatacgttccctcgaagatgcacaatttcagcatcaaggtggataaaaaggctcacgacggcacttatgtctttaccctcatcagcgaatccatcacagcttgggaaaacgaccccgtcagccacaatgcaacagcaaaagaatacattgtcattgaatccaaagccggacaactgaaagagtgcatcaccgcagcaaaaaaagatttccgaaaagtccaaaatctgaaaatcacaggagaaatcaatagcattgatttctacttcatgagagattccatggacaaattacaggcattaaatcttaaagaggtgattattaaagcattcggtagagaacccattcataatattgaatgcaaagatctccaaattcctgcaagtgcattccatataaactccacagtgggaggaaaaaatagcctactaagactagtacttccagataaattaatttcaattggagctcgcgcattttatggctgcagatacttaagcggctccttaatcatacccgaaggagtaactgaaatacaacagggtgcctttactggatgcaaatctttaactggcacactatccttaccatccacattaaaatatattggaaactctggtaatggacctgatcacgaaattagagaagaaggtttagattattataatggaacattttcaggttgcggatttacgtgtgaattaatcatacctgatggagtcgagttgattcgaggttttgcattcgataactgtaaagggttttatggaaatttaaaattaccaagcaacttaaaaagaattggagaacgtgcattctttctctgcaaaaacctcaatggctctttagaaataccacaaggagtaacagatattccagcagaagcatttacaggctgtggctttgatggcacacttacgttgcatgatggtattatttctatcggtaataattcttttggtgaatgccacttcaaaggcgaaatcaatctgccaaagaatctaactattattaatgataacgtgtttaatgcctgcgacttctctggagagctcaagttgccacaatcattaaccaccataggtgaaaatgctttcaaaaacaactggagactgatgggagttttagaaattcccgaagacgtacaaactatcggtgccggagcttttgctaattgcagaaatcttgaaggcattatcttcccggcagggctggaaaatatccgttatgaagcctcttggggtgataatggcggagcttttgccaattgttttggtatcggcagtattgtctgcaaagggacaattcctccatatgtacaaagcggagccttcaatggcgttgctaaagataatttcactttagaagtaccagaatcagccatccaacaatatcaggcagccgttggatggagcgacttcaaacgcattgctgcacaccgtgaattagtgtgtcgtccagctatcgctaatgccatcaacacacaatgcacccgcaaactagtcctgaatgcagagggtgactgggaagtaatcaacaagcctgagtggtgcagcctttctgccatgaacggatcgaaaaaaacagaactaaccctcactatccacagcatgccacaaggctcgccgatgcgtgaaggcgatatcgtatttacattgaaaggtaaagattacaccactaaatgccatattacccaatatgactatgaatatgatgaagacgaaatcatcacactgcaatcccattcgaaaggtcaaggagtaaacctgatattcattggtgacggatacgatgcaaaagatgtatcggaaggactctacctacgtgatatgaaagagcaggtggaacacttcttcaatatcgaaccttatcgcacataccgcgactacttcaacatctatacagccattgcagtatctccggaaagcggtatcggcacaatcaataccatccgctatgcaaagtttgaaacgacattcaccggtggagtaggcttaaaatgtgactatgatgccgtatttcaatatgccttgaaaatgccgactgtaaatgaaagcaacctgaaccaaagccttatcattgtcactcccaacacatcagattatggcggtatctgccaaatgtgggaagatgggtctgccattgcattctgccccaaaagtacatacggctatccactggatacacgcggagttatccaacatgaagccggtggacatggattcggaaaactggcagacgaatacatctaccacaatgaatttatcgacttctgtcaatgtacatgctgcggacacgtagatgctgtaaaaggagggcatgcgttaggctggtatcaaaacatttcactgacaggaaaaatgcacgaagtgccttggtctcatttgatttttgacgaacgttacagcaactatgtcgacatatttgaaggaggatttatgcacaacaggggtgtgtttcgctcagaacaaaacagctgtatgaataatgacattccctattacagtgccatcagtcgtgaagccatcgtaaaacgcatcatggaatatgccggagagccttactcatttgaagaattcgtcaagaatgacaaagttgacagttctatcagcactcgttcttcagaagaatatagaggtatcagtgcccgcagtaatagtcatgagccggttatccataaagggaaacctgatattttaaaataattgcaaaaacaaattgatatgagatcacataaaacaatattcggttttatcagcctttgtttcttgtgcaatattgcctgtgaaacaaacaaagaagaagggaaatcaatccaagaagaaaacatcatgacatttaatgttattcacccggcacaaacaaaagcatctgactccggtttcgaagcagaagattgtatcggtctatatattacagaacaaaatcttccgcttgaaccagccggcaactacatcacaaatgccaaactcacatatgatggaaaccaatggactccggaagaaaaaatattctggaacaaacaaagttatgatatttttgcctactacccataccaactgtcagcaccaacagtaagcgatatgccttttgaggtcgccttagaccaaacaacacaagaaggctatgaagcaagcgattttctatgggcagtccaaaaaaatgcctatggcagtcaagaacctgtttctctcttattcaaacaccgactgtcaaaaatgaatatccgacttgttaaaggagatgattatgaaggcgaacttccagaagatgctgaagtatatatacacaacacgattacttctgcaaccatcgatctgaatgtcgggattgtaacaccaaatatttacggcacaactcattccattcaagcaaaaaaatcaaataaacagctatattcagctattattgtcccccaaagaatcataaaccgacaacctttgattgaaattatcatgaaaggagtatcatatatggttgagagttcctttgtctttaagaccggaatccagcatactataaccttgataatttcaaaaaatccggaacaaattaagatagaaataggtggagaaattgaaaattgggaaccataaaacgaataattttttattaaatcaagtatatttgctggatgaatcgatttatctgtttatgtttgttattatatatgtttgttgcctgcacaaaaaagcaggcaacaatctcttatttacccgtacaaaacgatcaaaccagttcttggagtcttttaaatttaagcaatacaaaagcaaaaacaaaaatatttaaacgacagccatcgcccgttgtcaacaatctttttaccatcccagacactgctggactattacagctatacaacatcaataatcttgacacacctgtctgtacaaataaattttcacaaataggatatttctttgaagaagtcacattcgcacaacaaaaagcagaaacgccattattactcatagacaaaaaaggtaataccattaaaactatcgagtatccggaatacggtaaaatattgatggcacataacttcaaagaaggactagctttgatttatactgaaaacaaaaagtacggctatatcaatacaaaaggagatgttatcatcaaaccctattatgattatgcatatgatttttcagaaggagtggctatcgtcggtattgccaacacaaacaatcaaatctcatattcagtaattaatcgcaaaggagcaattctattcaacattcaactgcaaaatagccgattaaatggaacttattcatgcgaccgattattatataaaaatcaacaccgctgtgcatatttggacaaacatggaaacaccgctctattcctttccaaggatattattgaagcatctgaattcaaacacaatacagcattagcactcacagcccaaggtattggttttattgcaaaggacgggaaaatcacgattccctgccaatacgaacaagggcgtatcctatcctctcaacgcgcagctatcaaaaaaaatgggaaatggggactaacagatttaaacggcaagcaattaactaacttaatatatgatgatatctctgaatattatcataataatttagcgattgcccgtatcggcaacattacattcatgattgacaaacaaggacaagcaattgatacaatacactataagtctatcacacatgaccctatcgctatcggaaaaagagctcaagtttttacatactacgctccacaagaaagcacaaaagatgttattcctgaagaaaaggcagcgaatcaaaacttcatttatgcaaataatccatttagcctagctgctcaaaagattatttccggacagttatcagatgtagattctcaaaatcgaaaaatcatcattgaatatatggaaaaattccgtaatgcatacattaccaaagacattgattttctcgagcaattatttagcgaagatgcactgattattgtcggtaaagtaataaaaaaagctcccgaacatggccctcgatacctttcgtccgaacaaattatatataatttaaaaaacaagcgggaatatatcaaccgactaaaagcagtattcaaagctaacaaaaagatccaaattaatttcagtagattccagataaaaaaacatccgacaatttcaggaatatatggtgcaacggtacgacaaggatatacatctgacctttattcagatgaaggttatctattccttttatgggactttcgtaatgtacaagcgccacaaatacatgtacgaacctggcaacccacattgcttgacaataacaccccattgcccgaacaagaaatattcagcatacgaaactttaacatagaataacatgaaaaaatacatcacaatcatattattcttagcttcacttacagttgcccaagcgcaaaaatttaaggtacattccttccgtttgttgtctaatgatatcacggcatgggtaaatccagtacgcgaccttaacaatgaagcatgtgcactgcttaaaattgttgctgatacaactttttccttttcgacccctttaggtattgtagaaagaaaaaatgaagtcggggaaatatggttatatattcctaatggaagcatacaaataactatcaaacacccgatgtggggtattttacgtgattatgtatttccgactcctctagaatccaggcttagttacgaattaaccatcacgccaccaccgacaatcgaaaaaaaaatggaaccgattgctttaattatcggaaaacgtaaactaccttcacaaagaatagattctacctctatcaagaatatctatttaaagcaactttccccaaaaaaatttgcaggcttcatgctactaactacaggtatataccactcagaaccatctttaggggtatttgctggaataaataaaaaacatggcttcttcatccattatcaaagcagtctaaaagctcttaatacgattgggaattgcaataaaaatggagtcatgacaggcaacaacaagacgccttattattccggtaagacacaacaacaacgattctccatttcaattgggagcattcaccacattttcaaaatttgccatttatacgaaggtattggcttcgggaaatacatagtcggttgggaaacaactgataaagattatttaaaaaatcaagacctttccaccaaaggcatcactgccgaattaggactaatggttaaaataaggcaaattgctttatctgcaggaatattaacaatcaaaggcaaacactgggaacctaatataggtataggcataaacatttaaaacatgaaacatattttgcattatatatttttcttttgttttgtattcggagcgtgtaacgaagatataaaacctgatatttttcctcctacacttacattatatgaagctcgagaaattacacggacatccgccattatttccggaaatatcctgttaaatggtaaagggattgtcaccaaagctcattttttatatgcaacggatcctcaatattctgatgctcaaaaaataaaaatagatacaacggaaggagacgtagaagctcatctaacaaacttaaaaccaggacaaaagtattattattcgcttatcgctagcaatggttacaatgatatcaaaactcccataagtaattttcaaacatttcccaatacagctccatccattgaaaatatctcacttgtatacaaaggacctttaagtgcagctgtatgctgcaaagtaaccaataatggtggagaaccattaacttcacttggatttaaatatcaaaaaatagggaacccaaccattaactttatttctgcagaatgtgacagtaccggctttttccaaacacgtctttccgaccttgatatggatgcaacctatcaagtttgggcatatgccgccaatactgtcggagatacaaatagcataactattaagtttcatactgacagcattatctatctggcaaaagccggcatgctaccagagatcatacaaaatgaagaaaaatacaaattaacaacactcaatattgcaggggaaatcaatggtacagatatacgcctcatccgtgaaatagcaggaataagctatacaaactcaccaaccccaggccaactgagcagtctaaatttagcagaagcccgcatcgtagcaggtggacgcagctatactgcttccagatacacagaaaccgatattcttggatttgcaacatttgcaaactgcactaagcttaaagaaattattcttccctataccttaaaggttatcaattctaacgcttttaaaaattgcagaagtttaacctcgataaccattccagataatgttatcaactatgaaccatccgatggctgtatccgtctagaaaaaattcaagtttcaaaacttaacaaaacttactcagctgaagacggtattctctatgacaaacataaagaaaccctattacaatttcctgaaggaaaaataaccaaaacaatccaattcccgaaaacagtcaagaaactatccgactattctttacaacattgtcaagcagactccattataatacctaataacattacagaacttggtagagaagtttttagaaactcctctattcaatatatagaactctctattgacaaattacccactgccacgttccaaggatgcacttcattaaaaaccgtcaaacttggccaacaactgatgtacatttctgcctattgttttgatcaatgctatattcaacatctatatatttcaactccggttccaccagtttgcgataaatatgcttttcatggaacaaatatattatctaattgtattctgcatgtacccaaaggaagcaaacacatatatcgtcaaaatactccatgggaaaatttttccactatattggaagagtagacatttctgattgtaaatcaacaattttctttttatatccaaggctttttctcaaatccacagtagggaattcggtatccaacctctttttcagatagttccaaagttctaaactatccttagaggattggatactatctcgtctctgcttcatgagtctaccccgtataaacagtctttcctcttgttcttctgcactgatagaggtattagaatatacgggaactgacaattgtacattattcttcataattggaacaacatattgccaactaccccacaaaatcaaacaaaagaacaatacgactgcagcaattatcttataccgaacaaacaatcggcctccacctaaagcttcttgtacttcctgcattgatccataacgcttacccggttgcacttgagtacaatgctgagctattctcataagatgcttatccttaagataagttgccatctcaaacataataaccccaaatgaataaacatccaccctacaatcccattttgcattggcatccaataactcaggtgctaaatatttttttgtacctgctggaatttttaatatatcgtaatcatcacaatctgaaagtccaaaatcaatcaacttcacatgattaccattatatgtaatcataatattctcaggtttcaaatctctatgaacaacctgtttattatgaacatattgcaaagcaacacaaatatccttaacaaaccgatagacaagtgcatgagtcaatttcccattatccataaaagacttcagagtaaccccatctacatattccaacaaaatacaaaaccccaacacctcatgcttctcccatcccaatgtcctacagatatgcggatgctccaattgatatccaatatcaaattccttacgcaaaagttgcacataaaattcttgtcccaaataggatggctttaaacattttagtatatgtagtttcccatatcgccgacaagtaaacaaacggcaatatcctgagtctggagtataaaattcttctataacaccacattcatcttcagcaaggaaatcctcaccaataaaacctgatgacaattcaactttatcattcatgatccagacgatttactaaagtcaatcccccatttctacctgcaataaaaggtgcagtcttttcttctccacgcaatacatatgccaacgacaatggttgccctaacaagaagcacacagcttcaaaacgatcccctttacacaatttggattgtttagattccaaaacctcaaaccaagaattaccttgatacaatagacgcaaataacgattaggagcccagcctatttctacctcatcgcctggttccaaattctgtgcctgcaattgtttcgttgtaaaaaaagaagagttacacacactatgcatttttaaaaactgacaatagcttataaagctctcaaaacctgcataacgtgccaacaaatccaatgttaatacccgaggtttatgcacatctgccacatagccccacaaacgttttagagtggaggttgatataattaccccagcctgcagttttaaatgcacggaaaattcatcaaaatctgttgttgttcttagacttttgccatacttctgctcaacaagtaataacaactctattatctccggtttagattcattcatacactaaaatagtaacacatgcgacaatacatctgcaaatgtaataaaatacgtctaatctaaaaatataaaaatagcggtaacacctataggcatcaccgctatatcaatatgctgcaaatagcaataaactattttgcattattctccaaaaaggtcaaaatataatctactgtcgcttctattccataatacgaagaattcacacaaagatcatatgaggctgcagctccccatactttatctgtataataattataatatgcggatcttgatttatctgctttatttataaattcctcaacttcattctccttcaattcattattatattccaacacccgcttaatacgatcttccattcttgctgtaacaaacacattcaaacagttagattcatcccttaaaatataatctgcacaacgccccactaatacacaagaaccttcagctgccactttacgaatcacgtcagactgtatttgaaacaatgactcattcgaaagataatcgttattttgaaaaattgcactattcatagaaaaacccattgcaaatgcctttaataaaccaccggaggttttctcgtctgccttttcaaaaaactcaccacatatcccactctccttagaagctaaattaatcaattcacgatcataataagcaatacctaaacgttctgctagttttttaccgatggtacgtcctccacttcctaattgacgaccaattgtgatgattgttttatttttttccatatctggatatttataatcattttacgcaaaactatataatcttttccattatacaattccatgctgcctaaatttcttcaattgccaccataacatagagcttgatgtcaaaacagctaacccatctgcaataggaaagctaagccatacaccatcagttccatacaacgcaggtaaaattaacaaacaaggcaataaatatattaactgacgagtcaaagacaagaaaattgcctttcctgccattcctactgattgaaaaaaactagtagacaccatctgcaaaccgacaaaaggcaataacaataaaattaatcgcattccatgtacggcaatatttatcaactctgtatctgttgtaaacaaagaaataatcgcatgtggaaacaactgacaaatcaaaaaccccaaagaagtgacagatactccacacaaaattgtatattttagcaccttgactacacgctctacctgccttgctccataattatagccggcaattggttgcattccttgattaaatcccataacaatcataatgaacaaaaaaacaatccggtttacaataccatacgccccgatatacatatctccgccatagttttttaatccgttatttaccaacatcacaattagacatgaacacacattcattaaaaagggtgataatcctatcgccaacatcgatccaacaatgctcattttcaaccgaaaaattccatgttggaaacgtatataactttttttgtgaaaaaaatgacacatcaccccaatcaaagccatgaactgggcacatatcgttcctagagccgcacccataatacccatatcaaggacaaaaataaacaaagcattaaaaataccattgatgatcacagcaaagagtgtcgcagccattgcacgctgaggatatcctgaagcacgcatcacctcatttaatcccatataaatatgcgtaatcaaatttccatacaatatcactttcatataatcacgtgcatatggcaaagtatcagcactagctccaaaaaaaatcaagataggatctaagaagataagacatacactcataaatagtaggcctatcaccaaattcattacaacaacattacccaacacagcttcagcactttgtaaatctttttgtcccatttttacagataccagagtcgatgcaccaacaccaaccaaggcgccaaatgctgcagccagattaataaaaggaaatgtaacagccaagccggctattgccaatggaccaacaccatgaccaataaagatgctatccatcatattgtataacgatgccgccgtcattgccacaatcgcaggaacggcataacgaattagcaatttacgaatatcttccgttcctaacgacaacggattttgtaatgacatgatctaatattttattattcaccttctatcaattctcgtaaagcatcaatagcctcttcttcaggaatagctgtgcggaccatctgacgccctttataaagattcacttttccattacctgcccctacataaccataatcagcatcacccatttcccctggaccattcacaacacatcccataatagcaatcttcaaattatccaaatgggcaaatgcagctttcacttttgctactgctccttgcaaatcatacaatgtacgtccacatcccggacaactgacaaattcggctttataacgccgcactcctgccgactgcaatatatttcgagacaatgcaagagaaaaagccatgccctcaatctccggagtataaatccacaaaccagccggcaaacgatccagaaacaaacctccgatttgtgctgccgcctgtaaacttaaccgctcacaatcctttccatttaataccaaacgcaccaatacctgattactcaagccccaataatccagctgatgaaacatctctcgatactcatgataatctatacccaacgataacaccaaaatagcttgctgatcctttctcaatttgaacacgaatgtttcatccaactcttcaacacttctgatttcaatatatacagacatctcatctggcaattcagggcctgccaaatattcttcaacactacataatggcacagcattccgattgtaaacatgtgccatatccaataaatgaagcggcactaatattttagtttccaccggtaacttcgtcagttccggtcccaaggtttctgtatataacaattccggagccttcactcctcctttcaaacggatacccgacacaggatcattaaattgatcaacagaaaaatcaagttgtcgactaacttcctcatcaaaaacatcaattccagacaaatccgccaccaatatcggacgagtacaacaaccttttaatcgatctccactacattcaaatttaggattactacaaatatccaccaatgaaacggctacaggtatttctgcttcaggagcttccgttaaagaaactctgattgtatcaccaattccttcattcaataaagtaccaattcccacagctgaacgaattctcccatcttcaccttctccagcctctgtgactcctaaatgtaaaggataagacatgccctcatttttcatttcgcgtactaataaacgaacagcatcaaccatcaccctacaatcactggattttaaagaaattaccacattatcaaattgaatagccttacataccctcaaatattccatggtcgattcaaccataccctccggcgtatcgccataacggctcataatacgatcagacagtgaaccatgattggtcccgatacgcacagctgtaccatactgactacatacattcaaaaattcagtaaacttctttcgcaatatctccaactcctgcgcatattcttcttcggtataattcagttgtttaaaagtagcacgtttatctatgaaatttccaggattaatacgaaccttctcaacatacttagcagcgatcaaggctgcatctggagtaaaatgtatatccgcagacaaaggagtattatatcctctttcgcgcaatgctttatgaatataacgcaaattctcagcctccttcaccccaggagcagtaattctcaccaactgtccgcctgcttcaataatacgaattgcctgctccacacaagcctctgtatccattgtcgaggtattcaacatcgattgtatcataatcggtttttctgatgacaatacaatattccctatttttacgatattcgtttttctgcgcataactttatttatttaagtactaacgaattgtgttcccagttaaaacttgtttaatattttgtgtattacgaggattccttacatctttcccctctggagtatacacaaaatctatctcctccttgaaatattcataaactttatgtcgaacaacctttgctgtcgaattgactgttccgttcgcttcacacaatgtctctggcaaaatagcaataacagctggcaaccaacgttctggaaacatcccttcaaattctcctccttttctaaaacgcaatatctcaccataaattttatccaacatcaatttatatccttcaacagactccggagtaacatgctgcttcaatacatactctctcaatgcagccttattaggtacaatcaagcctgctgtataagaagattgattattataaagtacacaatagtcaatagaaggcgatagttccataattgcctcctcaataccttccggactatacttttctccatcgcttgctattaataaagacttaaaccgtcccaatacatataaaagcccctcctcatttacatagcccatatcaccagtataaagccaaccatcacgcaaactttctgctgttgacgtcggatttttccaataccctttcatgacattaccaccacgtataacaatctctcctttttcaccgcgtggtaactcattcccactatcatcacatattttcaaatccatcggtcgcacaatctgtcctgaagagccgaaatggtgtaactgcggtctattagaactaattaccggcgaagcttctgaaagtccatacccttgcaacatgggtacacctaaagcacaaaaataacgctgtagttcaatatccaataaagctcctcctcctataaaaaagcgaagattacctccaaatacatcccgtattttcttaaatacaagtatatctactaatttaaccaaaggatataacactatacgcattccttttccctcatgattccccgtaccatagtaacgatatgcaactttcaatcccttattatatagccattggacaaatttccctttcaattgtatgccagcctctatattcttcttaaaattcttagctaaagccggcacacttaataataaatgtggctttacttctttcatattcaatggaatattcctcaaatattccatgggcgaacggccaaaatcgacagaagccaacgaagctccattatacataaaagaataaattccaacagtatgagcaaaactatgatcccacggtaaaaacagcagaaccttgaaatactcaggcacctgtatcaaagagtcggattgcaaaacattgctgacataatttccgtgagtcaacataatccctttcggctctgcagttgtccccgatgtgtaagaaatattagccaaatcatccatctcaacagatgaagcccttttctctacttcgcccggatgcttttccatccatacttttccactagacaataattgatcgaaagacacatattttccttcaacaacatgcgaaggacgaataacaaatatcttctcgatactcgtcaattcatcttcaatttgacgaatcgtattcacataaaaatcagaaacaatcaaataacgagcaccagaatgattcactcgaaaaactacttccttcggagtcaacttaatactcaaaggcacattcgtaccaccagcataaagtaaacctaattcgccatacacccaagcattacatccttcacttaacaacgctacacggtcgcctttcccaagtccaaccgccatcatccctgctgccacatacattacttgttgcttcacttcagaataagtagagggctggtattttccatctcttttctcccacaaatatacattatccgggaatttgctacagctacgctctagcagatctattattgtatttaaattcttctctttcatagcaagtgcaaagatacaaaagtaacccattactcgtatttacgtacatatacttttaacccattaaattttagacttatgagactatttatagcatgtatgctgacacttgtcatctatattatgatttgtgtctgtgaacagaagggaaaggaagtcccaaaagtttcacaacaattgaaaattgacaaagattaccctactctacaactacattcgccgacttccacccccaatccgccgtatctttatatcaaagttgaagacagtacaacaaaacaaaatccaacagaaaaaataaaaaaatatccatagcttgaatgttatacagataaaactatacctttgtgtcatcaaacaaaattaattgctcaaatcttaaaccatgaaaatagctatcgcatgtgaccatgcaggttacgaattcaaggaaaaattggtggaataccttcgcaccaaaggacatgaagttaaagatttcggaactcattctgccgaaagtatggactatcctgacactgcacatcctatggctgcagcagttgaatcaggagaatttgacaaagggattgctctttgtggaagcggtaatggcatcaatatgacggtgaacaaacaccagggtattcgtggagctctttgttggactgttgaaatcgcatggctggctcgtctgcataacgatgctaatgtatgttgtcttcctgctcggtttattccttatgaagatgcccaagatatcgttgaacgttttctaaccactgaatttgagggaggacgtcatcaacgtaggattgaaaaaattccagtaaaataaataaaaaaggcaacctaaccggttgcctttttatttcaactagattctacacatatctcttctttccttctgagcatcagaaacggccagcgttgccatatgtacaatatctcttacctgacatcccatctgaagaatatgtacaggtttattcatacccagcagaatcggtccgatgatctcatgactacccaattcctgcaacatactcaagccgacactaccagaactcaaattcgggaaaataattgtattcacatcacgatctcctaatattgaaaacggatactccctttgtctcaattctttatcaaaagccatagaagcatgcatttctccatccactaaaatttcaggatacttattatgcaactgagtgatacattcttgaatctgagccggacttcctaaacgatattccccaaaattcgaataagaagtcaaagctatcacaggatcaatatcaaaacgtttcacagcatcatgagtcaaaacagttacatattccaaagtttctgccgaaggatggctatttactgtagtatctgccaagaaataagttccacgttttgttgtagcaatgtgcataccggcagcatatttgcaacatggttgcaaaccaaccacctctttggctttttcaaacacttctttatatggagaattcacacctgaaataaaaccatctgcatcgccacactccaacatcatcaaaccgacataattaggatcttgcattttcaagacagccttactcttagatacgcctaggcgctgcattttttcataataatgctccgtatatcgttctattgcatctgcttccacaaccggatcaaaaatcgtgagattttgaattgtcaacttattacgagctattttatcttgaataacagccgtattgcctactaaaataggataagctatatgctcggctgtcaattcctgaactgcttgcaatacctgtaaattttccccttctgcaaacaccacacgcttcggattcgctttcgccttatgcgtcatcaagcgcattaatccattatcatgactaacacgcttctccaaactttcgcgataagcatcccaatcttcaatcactcgacgagccacaccagattcaattgcagctttcgcaacagcaggagccacacaactaatcaaacgattgtccaatgcttttggaataatataatttctatcaaacgaaatcgccggatcatgataggccatcttcacactttcgggaactggctgtttggtcaaatccgcaattgcacgggcagctgccaacttcatctcttcattgataccactagcctgcacatccaatgcccctcggaaaatgtatggaaaacccaatacattatttatctgattagggtaatctgaccgtcctgtcgcaaaaataatatccggacgagaatgcatagccctctcatagctaatttccggattcggattagccaaagcaaatacaatgggatcctttgccatactctgcaccatttcttcggtcaaaatatcagccacagacaatcccaaaaagacatcagcacctttcaacgcttccaccaaagttctagcttctgttggcacagcaaattccattttttcagcattcaatcctgcacgcccctcataaataacgcccttactgtcacacattaaaatatgctcacgctttacacccagacttctataaaatcgggcacaagaaatcgctgcggctccggcaccattcactacaactcttacatctcctatattcttaccattcaactctaaagcgttcaacagacctgcccccgaaataatagctgttccatgctggtcatcatgcatcacaggtatatccaactcctccttcaatctacgttcaatttcaaaacattcaggagccttaatatcctccagattaattccaccaaaagttggagaaatcatctttacggtacggacaaactcatcaacatttttcgtattcacctctatatcgaacacatctatatcagcaaatattttaaacaataatcccttaccctccattacaggcttccctgccaaagccccgatatctcccaagccaagcaccgcagttccattcgaaatcactgccactaaattactttttgcagtatagcgataagcatcacctggatttttttcaatttccaaacatggttgcgctacacctggagaataagccaacgacaaatcatgttgagtgctataaggtttcgaaggaataacctcaattttaccgggacgccccgattcatgatattttaaagcttcatttttatccatattcattcatttaaatattccattgatttctttttttcaaagatgcaaaaaaactccataccatcaggttaaataaaggttaaagcatactaacgacacaaagataatccgcaaatcaaagtaaattgcaacattaaaattaaaaaaaatacatatgaaaaaactttattatctagcaggtcttatggtagctgcaacagcttgcacaacagctcccaagaccactgtaagcatccacatggagggggaaagagtcaatgaaattcctattacattaaacacaaaagactctatttactctgtaagtctcgattccacaaattctgctaccttacaattggcaacaaatttacaagcagactatgcaaccttacaattaggccgtatgcatttacctttatacatcgagcctggaaaaaactttgatatcgacataaatacaaaaggtcgcaaaattactcctatatttaaaggtgaaggagccgctacgaacagttatttgaacggagacgttgccaaagacaatacgcctgcattggaattggatgaaaaagcattcatagaggccttagccaacaaagaagcacaattggttggaaaccttgaaaaagaaaactttgatgctgcatttgtaaaaatagagaaaaagaaaatccactattctctttattcctccatttcaacatacgttgcctaccacccatattatggtaaacaacctgattacaaaccgtctgatgaattatacaacacacttaaaagctctgtatctgaagagccggagttaatccatattcaagaatacaagagcgctgtaatcggatatatagaagtaatgtcaagacgctcaaaagcttcaaattccttagaattactaaaaaatcaattagacatcatccaaaatgacttcaaggcaccagaaattgcagattttacagtagactactttgtcaaagcatacgttggcagaaatgggattgacaagctctctgagttttctacgatttatgacaacaaagtaacagatccaaagaaaaaagcagatttcaaagcattgtgtgaaaaatgggcaaaagtagccaaaggacagccttctatcgatttcaaatatttagatatcaatggtaaagaagtaagcttaaaagatttgtctggtaaatatgtatatattgactgttgggccacttggtgtggaccttgccgtggagaacttcctcacctgcaaaaacttgaacaccaatataaaaacaaaaacatccattttgtcagcatctcttgcgaccaaaacaaagctgattgggaaaagatggtaaaagaagaaaaactaggaggcattcagctacacaatggtggagacagagcgtttatggatttctacatgataaaaggaattccacgcttcattctattagatcgtgaaggaaaaatcattcaggccaatgctacacgtccgtcaaaccccgaaacggcaaaaacatttgacgcacttgaaggtatttaaaacatcacactttcgatgcacagcaaatattttatgctgtgcaccgaaataacacccaaaattatttttcctatgaataaaatacattatttagcaggcctcttattaattataacatcctgcaccactaatcccaaaaccgatatcagtattcacattaaaggagaaacaaataattattcaacatttctaagtactacagatacaatatttacaatcaatctagactcaacccatacagccaatattagccttccagagcactttaaagccaattatgcaacaatacagtttggtatactaaaagttcccgtatatatagaacccaacaaagattttaatttaacacttaacgtagaaggtcgcacaatcagtacttcatttacaggagaaggagcaataaaaaacaaatatttaaatagtgaaccattaaaaaaaagccttcctcctttggagctacaagaatccgattttttaaaacaattgagagagcaagaaataaagctatctgcccatttggattctatgaattttgattcacacttcaataaattagaaaaaaaacgaatccattattctctctattctgctctacctacttatattgcctaccatcctttttatgcaaaaattgaacaatatctcccttctgaaaaactatatgaagcactaaaacaagcaattgttgaagagccagaattaatgaatatggcagaatacaaaaatgccctacttagttattttgaaattatcggaaatcaaggagaaaccaatgctttagctattttaaaaaagcaattagacatcatccaaaacaactttaaaacaccagcaataaaagaattcataattgaccattttatttgtaaatacataggaagatatggtattgatggtctctctgaatttgcatccatttataaagcaaatgtcactaatcctcaaaaactcacagcctacaaagcattatgtgacaaatgggcaaaagttgcaaaaggacaaccatctattgattttaaattcaccgacataaatggcaaaaatatttcattaaaagaccttgctggtaaatatgtatatattgattgttgggcaacttggtgcgggccttgtcgcggggagttaccttatttacaagaacttgaacaccgcttcaaaaataaaaacatacattttgtcagcatatcatgcgaccaaaataaagctgattgggaaaagatggtaaaagaagaaaaactaggaggtattcaacttcattatggtaatgataaatcattcatggagttttatatgattacaggcatcccacgtttcattttacttgaccgtgaaggaaaaatcattcaatccaatgctactcgtccctctaatccagaaaccctaaaaacccttagtgcattagaaggtatttaaaaaaatctatttacaaaaaagccccaagtgtttggggctttttattttcatctatgcttttttactttacatcacgaacacagcggacacgcattgcaggcaccgataaagtatctgttgtattacgatatacctcagaagaattataatgaaattttcggtaaaatacacgcccatcattatcccgcgaagctgtccaataaaaccccttctcttgtacataacgaatacgcatataatgcgagtcaccaacaatccaacaacccgacataataaaattcaacccagaaccatcattatcttgttgctgcattaatgttgcaacaccatctcctctccaccccaaagtattggcttctcccacagacattcccaaagcaatctccaattttttccaatcttcatctgtcggcaatctccagccatccttcaaattggcacataccttacaagctgtgccccattcatacaaattcccgttttcctccatatcctgcttttctttttccttactagatgaaaaatcaagatataaattgctaccatattgactcaaatcatacgatgcatcataataaggtatcccagctcttaaattagaagtcatccattcctgttcacctatccgcacccaattatatgctattccattatcgggatctatccatgtccctgcatctaatggttttacttccggcagtgaattatcatcacaagcagtaacaaccaataaagccaataatacgatatataaatatttcatagtataaaatttatctgattaaaacttaatatctgctttcatagcaatatccttaataagagcatactttttaagtaccttttcataagatgcaaactccttcataacatcctcttcacttttagtcaacaataaatgaatataagctgtaacatcttcttcttttgaacaatggaacatagaagaagtgttatttactaatagacccaactcataaaaaggctccatttcttctccgaacccccatttaaaagtgccatacaacagatctccccatgtacccacagtcatattataaaaaggttgcaattcaccatcatatttacttgaaatacttgcacctgcaatatttgacaacaacttcatttcatctaatttctccatatcagatgctgccaaaataaaacaacgcagtgaattcaaaaattcaggacgagaaattgttccagatgtttcagacaaaatggtatccacaactaatacagaataaggacgcatcagattatgcttagccatacgttctgccaacttagtaacaaattctgcccgctgttccttttcttcgatagttttaaaatacgcaaacttatatttcgtatttccatcatagccaaacaaactccaattcggatcaactgtttctgtctgatatacaggcttgcctctaccatcttctccgacttgtgtatgtctcaacgtatcattaaaaaggatataaaaaccattttgttcaaaaaaatctctacgcaattgtgcttcttcactcatatcccaagcttcaggagcaaacgtatgatatggttctgatgacatcaattcatcttctgaacacgactgaaaaaacatcattccccaaatcacaaataaaatattcaagtatctcatgattctatatttaattatcatttaattatttatctccatatccctcagcatacccggatttaaaaccttttgcatactcttgagcataaattgtaaatacggaatactctttattttggtaatcataaaagcgaggattctgattactatccacgaagttcttttcttctaatttatctgcttttccaatagcttttccacctcgaagtccgtcatcatatccttgcttagccatatccacaccttcatattcattgtatactgtttccatacgctccggacgctctactgaaggaagagtattttgaaaatccgtaacctccttaggcaaagccaaagtatacgcaggatcattttcttccaaaacataacgtaatgtctgatatttcaatccagtattcggatctgcgactttactattaaaatctgtataataatgcacaatctttttactaaatggatatcgtgaatctaccatataacgacgtaaatcaaaccaacgatgaccttccaaacaaagttcacgttcgcgttcatctcgaataaattgaatcaaacttgctccatcaccataagatgcaacatcctttgtcacacgattttgacgcaaacgcttcaataattccactgcttctgctgttttacccaattgtgctgcggcttctgctgcatttaaatatgcctcagccacacgcatcaaatatacgtcagaaacctcaaaagcagtcgttccatttttaaaagaacgtggaccatccacttttccaaacacccacacaggtgttgaaggcacattagatatcataggagtaatttgacgaatatatataccacgacgcaaatcactattatcactatcagcaccatataaacttattaaatctttcgatattatataagcaggataccgcaacacttgtcccatagcattctgcgcgtcaatagaataaagagccggcgccaacaaatgtccccccattgaaaaaatagtttcaacagacgaacggctaagaaaatccgcaccaccagcagcattccaatgattcaaattttccagttcaccttttcttacaataacactatctgcataatttcgtgcattctgccaatcttgcatataaagataaactcgactagttaacaaatgagcagcgacaatatctgcacgatacggatgattcttaacaggagtctgacgtaaacattcacgcgcattcttcaaatcagccaaaatagtttcatacacttttgccagagactcactgacatattccttatcttcaattttctgacttaacttcacaggaataccaggctcattcgctgcagtggcaggatcaaatggtttagcatacatatttacaagagtaaaataatatatagctcttaaaaaacatgcctcacctttgatacgaactttttccaattgctctttctcaccatcagcagcttgttgatctatatgcgctataatttgatttacaatattgatacgtttatataattcattccaatcgatatcctctctatctactttagtctttttaaaatcaataccaacttgcctctgccatgtcgcccaaccaaaaaacttatttcgaatatttaatatatcagcattattagccttcctgaaaatttcagtttcatcagacatcaaatgcagggacatcaaataaggttcatccatcttaagaacagaacttgccaaataggctttacctggacgccaataaccatctccaataagtaattcgtccagatcagtataattctctacttttgaaaggtcttgagagtactcctctaaaaaattagaacaagaagtattcagccaaatcaatataaatataaaaaaatatcttttcataaggtcagaattttaaaatgaaacattcaatcctatagaataagtaggtctatcagataattgaatatctgcgaaaccactttgtgagggagtctgcccattcaatttcttagaacaaatagtaaataaattgcttccggaaagcacaagttccaaacgcgatatacctgcttttgataataattgttctgcaaattcatatgtcaaactaatattttgacatttcaaataattagagctaactacacgatgatttgaataatcatacatatcccaataactttgagctattggctgaatatctgccatatctcgagaccagtggttccgataacgcgcatatgcagaattagcaatactgataatcgcaggaatatttgtataacgctcatcaccaggctttttccaacgatttattacagaacgatccatattacgttccggataaatcgtacttacatctatactgctattcgttgcttgtccatacattccaaaaagacgaattttaccacccaaactataagcgaatgaagcatttaatcgtaaattcttataacgtacacttgtatttaaccctcctgacatgataggctctcttcgtccagaagcttccaatacttgcgaataagtagcaaacttactttgtcccctcaacttatctttctcttcttccatatcatcaaacaaaggaccaccatccactggactcagacctatgaatttataagaataaaatgtaccgacagatttacctccaaccaaaacagtcccattcaagaaatccttcaactcatattgatccgcagcaggattattctttatcttattgattgttcgactgaaagaggtagacaatgtccatctaatatcatttgtatttatcggcgaaactgtcgctgcaatactataaccactattatctacatctcccctgtttactatataagaatttccatcaattccattaatagaagaaatatcttttgccataaaggcatttttagtatgcttgtaatagtaagatacttccatcattaacttacgctgaaaaagtgaaaaatcaagaccaagattgtatgaactcgttttttcccattttaaatcaggatttgcgttcactttcagtgttgcggtcatctcattaaaatatccgtctgtcggatgtttttctataatcatgacaggtgattggtcacttagcatattaccttgatacccaaatgaggttttcaacgtaataaaatcaatccaatcttttttcaaccaattaatttctgaaatattccaagacccagacgcagaccaaataggcaaaaaacgattattactttgatctccgaaacgattacttccatctatacgagcatttccattcaaagtaaaccatcccttataactataagaagcagaaatatatccagagaccatattcgtcaaatcactggttaacaacggagtattagaagccaaccaagtcttataagcaggatagtcatctaaatttatattttttacaaaatccatacctctgtccggataataacccctactcgtattttgataacctttatatttggtcgaactcatttcataaccggcacttgcaaaaatattatgttgttgatcaacccctaaatatcgattagcattcaattgcaaacgaactgtatatgaattatttcttgtatcatttctctttaattctccaccaaaaggcatttcgctcttgctatttgttccaacctgtgctgcaacaccttgatctgtacctctgagactactagcataccaagtcttttcaccccaatattcttcttgtactgtattggaggttgaataagaaactattgcattagcattcaaccattctgtaaatttaaactgcaaattagcattaacagtcaagccagaaccatcttgtgtatacgaactgtttttcaattcatttaaaatattatatttatattcttcggtattactaccatcaacctttttcatataatattcatactctccttcattcgtaaaagcaggaatagcacgactggttttataggcataatctataggagaaagactttgaggataatagtctctttgagaaacattaccattcatactaaacgaagcagtcagccacttggtcatattaacatcaagatttaaagctgcagtatacctttcattatgatctccttggataacatcattatctcttgtatatccaatagaagcataataacgtgcatcctgtgaaccacccgacacacttaaagtatgctgatgtgaccatgaatcctttgtcaacaaatcaaaccaatcggtattcattgtttctatacgtgcaacttctgtatcaaactgagcaggagttataacccctttgtaaaggtcataagtcaatttctcaaagccaactaaatttacataatccggatagacatagtgagaatcaaacaattcctttgaaaattgaattctctccttagagttcatcaaatcaattttcccatctgtataacgtggacgttgacgaaaagtagttgtcatattataacgtacaaccggacgcccaatacgcccttttttggtcgtaataactattacaccatttgctgctttcgttccataaatagctgttgctgcagcatccttcaaaatatctaaacgctcaatatcttgtggattcaaacctgcaattgcattaccgatacgatttatataatccggatcattcaatgtttcaggctcaatattcacaggatcttgtactacgatgccatcaaccacccacaatggttcacgattaccaatcaaagtagacgtaccacgaatacgaattttcgggacaacacctacttcccccgaattcgtcattaacatcatatcaggaactcgtccttcaagcattttatcaatagatgtaacggatggtatcataatatcgtcagctcgtactgacgttactgcagacgttgatttacgccgatcaacaacctgataacctgtaacaacaacctcatcaatttcaataacactttcttgtaaggtaacatctatctttttttgaccggcataaactacattttgagtctccattccaacaaatgaaaactccaaaataatatccttattatcgggcaattgcaatttataatttccatctacatctgtaataacacccattgttgtaccttttatcaacacagttactccaggcagtggatttccctttgaatctacaactttcccctctacatgacgttctacaacttcttgttttattttttttatgacaatcaaattatcattcaaatcataagttaaatttgtatttgccaggtatttatccaacaattgtcctacttctatctgcgtttcaacaacagagaccttccctaaggcttcaatatcacttgatttatacacaaacatgtaaccactttgctcttcgatttgctgcaacaatacactaaaaggaagattttttacattcaaactgacccgattactttgtccatttacacttgcctggcaagtgcaaatactaatcaacaccatcattgcaagaagtctcattctttgcaaaatgggtttcgctcttcttttactttgcataatttgattttactttggttaatttaagcagtgttttacttacttatatatattctattcccttgatatctaacatgaattccatttgtagcttgcaacacatccaaaatcatttgaatattatcaaaacgttttgaatgcaaatgaaatctaacatcctttaattctggattttcataaacaacctcaaaatcataccatcgggacaacccccgtaaaatatcatctaaacgttggtttcttattacaatcctagcctccttccaagctattacatcttgaatatccacaacttgagttgccaatgtccctaactttctattatacaccgactgtttcgaaggctctaaaacgatctttttatttatgtcaggatagtattgcacgatttttcctgtcattaatgttgtcgttatcaaattttcatcctcataagcttttacattaaagcttgtccccactacttccaactccatattagccacacacacaataaagggagctgcagaatcttgtgcaacttcaaaatatgcctctccagaaagataaactttacgctctccattacaaaatacttctggatactttaattcactagcagcattcaaccatacccgacttccatcagatagtgttaaataaaaatcacttccccttggtattgtcagtttattataagacactgattgcttttccactcgttcttttacattatattttaacgaattagaatcaatgagagaaacatcaacacctaacaaagactgttgatccaatacatcagacgataaaattatttgttccccagtactaagagtcaatatcggcttattaacatcaatactaggaattttatcagcaagtaacacaacatcagaatcctcagcaggttcctttagcaaaaccattcctcctgcgattgtcaataacatagtaacaaacgcagcatatttaagtattctgattcttctttctcgtttcaaacgcttctgcacacgtaaaaaggaattatcaacagatacttcattccacttattactccaacgaagcctataatactctttgcagcactgcttgaataaaaatctacgagattctgattcatctaaccagctggaaaacattttttcatctgcaacaggcaaatttcctgataaataatcaaaaatatattcttcttccgtgtttaaatacataaaaatcaatcaaattaactcaattgtttcagtataacacggacaatcacaaatgggtgaatcaataagaattattttttataaaatacatttttcgcccctcagaaagaaaaacataaccaatgcatcagaaaattgcttccgcagttgtttcaatccatttgacaacaaacgcttaactgtattaacagacactcccaattcatcagctgcttctttatattttttattttgtacaattactgatgtaacaactaatctggttttttcaggcaaagcatttatcgctgcataaatagatgccaacaattcaggagaaatactatatacctcttcctctaccacatcaaattttaattcatcagctgtagtaaattttttttgatcccgaactttatttagacatgcgttctttacacattgaaacaaataagaagataaagtaaaagctgttactttcttatacattttgtcttttataaaacgatagaacacttcttgaacaatatcttccgaaaaattatttccttcaaaataagtttctgaaaaaaacaataatggcttataataacgttgaaacaataactttccaccaatatcaatatcatctctcaatgcagacaaaatatttgcatccaaaaattgattatccttgttattatcatcaacttgcattcttatttatttaaaccaactattaacatcctcgtatttcaatatatgaacaataattttaccatccgccgtaaaatgatgatgcttacaagcaaataattgttcaacaattcccaccatctcctcgcaagtcaatgaagtattataagacattgctgcagcctttgccaaagccaatacaatacgttcctgcattttgtcacgaatactgccttctgtatttttataatgctctatcaattctagtaacacttccttagcatggttgtatgacaaatcaggaggtgttgcttgaatagcgtagcagttcttaccaaacactgtcaattcaaatcctaaaaactctaaatcaggcaataaatcacctatcaaaataaaatccgaggcagacaactccaatacctctggaaacaaacatttctgtcctgcaaccctatgagcagtcaatgtttccatatacttatcaaacaacacccgctcatgcgcacgcttctgatcaatcaacatcaacccactctgcacaggagttacaatatacctacctttcatttggaaatagcaattcgtagcaggcaccacaggaggctgttcatccatactcggaattgttgtctgcaccggttcctctgcttctttcaatccatcgaacaaaatatcccaattagcaggaaccttatcctttctgtgagttcctccccaagaagatgtttgttcaaaatttgaatccgccggactcaaacttcccgaaccataattaaaagggttataccccggattataggtaattcgaggaacaaacggagtttcattagttgcaatcggttccacataatctaaacttccctctgtatcaaaatccagcggaggcataatattaaactttcccaaagcctctttaatacacgccatcaatatctggaaaaaatccgattcattctgaaatttaatctctgtctttgtcggatgaatatttacatccaccattgaaggatcaacagtaaaatataagaaataagacgggatattgtctgcacccaacaaacccgaatatgcttccataaccgctttgtggaaaaacgaatgcttcataaagcggttatttacaaaaaaatactgctcgccataggttttgcgcgcctgctccgggctacatacaaaaccttcgattttcaccaagctagtatcgcatttcaccgttatcagccgagaatttattgtcttcccaaatatattcacaatcctctgccttaaccccgacaccggcaaatcatataaaacagtcccattattactcaacgaaaaagcgattcccggatttgtcaaagctacccgcagaaattcattggtaacatttcgtaattcagtagaatccgactttaaaaacttccgtctggcaggaatattataaaaaagattcttcactgatatattagtaccttttgccgtactcactgcctcttgattctttaattccgaagctgcaataaaaatcgaagaacccaactcctcttcctctctacgagtttttaattccacttctgccacagaagcgatagagggcaaagcttcgccccgaaagcccaacgttcgaatactgaacaaatcctgagcagacgctattttagatgttgcatggcgttcaaaagccatacgagcatccattggcgacatacctttaccatcgtcaataacttgtatcacagccttccccacatttttcagtaccacctgtatatgttttgctcctgcatcaatagcattttccaccaactctttcaccaccgaggccggtcgctgcaccacttcaccggcagcaatctgatttgccacagaatcaggcaacaaatgaataatatccataagcaaaaaaatatattccaattactataagccaaacagctttagtaaaccttccggattttttacaaacacataaaatgctccgagaaacaatatcaccagaatcataaaaagacgtatcgtccgagccgaaccggcatttgtccgcatcgccttacgtttctcatactcgcttctaaactgccccctaacattaggaacatatacatcttcctcgccttcatccttcagaccgagttccgcccttgcacgcttcacccgctcctcgcgagcctccttttcaggatcccaataccgaggttttatattaaacctcttatattccggttgtttgaataaaaacatggttcgtattatattatttatttgaactaaaatgctttgccacccatttcggcactataaacaccccagcaaacaggtatggataataagtaatcaatcgccatagaatcgccatagcaattgccaaacctgcgcccggcaaaaactctcccaaatactctttgaacacaaattcggcaaatccacttcctcccggagtaggactcaccaacatcataatccacatcaccaattgccgagcaaaaatcaggaaatgttctccccacccatattttcctgcccaaaatgccatcaagagcgcatttacgacccaataacgagccgtccacgaaaaaaaggtcgcgccaaaagtctttaaccaaaagctaaatggtttatgacgcaattcatatgaatttctcacgatatcagaaccaacctcgttagcactatgcctccacttacgcaaaatacgccaatgaaaacatttcatcaacaaaaatttcaatccccggggattcctaaaaagtccgtaactcaatactatcaaataaaccaacttgatagaatatccccctaccgcaaaccacactaatcccgttgtcaccccttcactcactcccggcatatcccacaattcactttgactgacacacaacaatatcagtggaaacatcaatataaaatacaattcatccaaaaacgaggtagccatcaccattgcagaactccgccctactttaatcccttctttattcacaaacaaaatggccaagctggttcctccaatagcagaaggagtaaccgcagaggtaaattcccataaaaaaattatgcgtattgcacttatccaactcaaccttccatccgacaaggtcctaatcctcaccacatatcccaaatccctcacaaacatacacatcacagccaccattagccaccacacagaatgccaagtaaacgtaatttgctgaaaagcagttatatcaaactctttataaagcatatacgatactacagccaaccctatcatgaccggatatacgatcttatagggacttattttctttgtcagttgtttctctgattctgccattgtgctactctcattaaaagaataaagtccataaagttaatggaaagtttccgtttcggacacactccaagccataaactttatgaactttacaaactttaagaacatcaagtggagagtatcggggtcgaaccgacgacctcttgcatgccatgcaagcgctctagccaactgagctaaccccccatttcttgggcaaaaataatacaattcctactatttaccaatatgagagaaaaaatctccttattttcacttcctatccaaccatttgtcgatattcctcgttgcattactaaaactaaccgctaccttcaactattctctgaattgtctgaccgccatttcatccaaaccgttagcctcacccaattctactatctctcctgacaaagtatcatataattcctgctcggtaataccacagatagtatcataacgatggtctgtcgatatatcttccaaattgtttaaatcactgaaaacactaactttactgaatttagtcactcctgtcaacaaggcaaaacgcaaataccggtcacaacttttcaacactccataaaaagccttcaaggtattacggtaatcatcttgtaaagattcgttaccaattgcctgtaacaacggcttatcatattcgtctatcaacacgacaaccccacggcctgtttgcttacttattttttctattaaataagagaaacgctcttccggtgaacgctctcgcttttcatcaccgaatacagcctcccatttttcaagatgctgattcaaaatagcaaacaaagattctatcgtttcatattttttggcattcaagtccaaatgcaacaccggatatttttcccattcattctccaatttctccatcgccaagccatcaaacaactccttctgccctctgaaataggcctccaaagtagatatgagcaaactctttccgaatctccgtggacgactcaaaaaataatatttaccacttgtcaccaaccgataaaccagagatgtcttgtccacatagaagtaaccatcacgacggattacttcaaaactctgaatacctataggataaatcttgctcatctcttattttatctttgtaagatacaaaaatagcacaaatctttaatcaaacaataaatctgcatacacacgaaaggaaattataaaaggcacattgcaaaccaaactctactattcctaaacctaaagccacatcctctccatttcaactctatatcaaatccaggtaaacatctatacaaagcttattacaatattattgaaatcctatatacatagcattcatataggattcgtatagtatttatatagcattcattatagaattgctatagaattgctatagatttacctcggatttgtcttagaataaagaggaagtagtgtcgaaaaaattatttaaaagagaagctggctcgcacagagtaatgatcagacaagacagccgtatctcgacgataagataatgtctttaaattaggcgtatgtaagatgtaatcaatgcgaaatgaaggccattcgcctatataggtatttcctaaacctcgcccacactcaataaaagcatcatccagacctgtcttgattttatgatacgtgtaagacaaaggagtatcattaaaatcaccacaaacaactactgaccatggtgtctgtctgatatgccgatgaattaactctgcttgttctgcacgatattttttcgcagatgttaaacgagttgtcaaacgacgagctccgtccggtaagccactttccccttttccttggctcagttgctgcataaaagctcgctctttttgcccaagacgataggattcaagatgaatactataaactcgtaccgtgtcacgtcctagttttaaatcacaatacagacaagcccccgaatgttttgtttcaaaagctacatgcccttttttaataatcggtacacgggaaaatatcgccgtattatcataaacataatggtagggatatttttttaaacgcttgataagcgacttctcatccgcactgccggactttattgaaaactcttgcaaacagataacatctcccttgtaagaattcagataattaagaagtttatctttaatttttcggtcaccagaccaatgatagaaatcaaaataacggacattatatgaaagtacggcaagatctgacttcggctctgtatcttgcaccttggccgttccataataactcataaatgccggaattcctgctattatcacaaccaatgcaatccaaaacatccggtgccagttagccaaccaataaaataggaatataagattcaatatcaataaataaggataagccaagcctaaaagagccggcacaacaaaggtattaggatttacataaggggccaaataggcacctagaagcgctatcatgcagacaaaggctgggacatacaaaaactttcctaacaaccgaaacatatttttctatttataaattagttacgtccggatttaaaaagtattgccttttcttccctagtcaaactatcatatcctgaacgggatattttgtcaagaatttcattgatacgatcgtcctgttcctttttatccgcattacacgcattattgttcattcctgctgaagaacggcggtatttgatatgcatttttttacgtcgaggcatgcgctcaaaccaatctataggacaggtaatccaagtcgccaaatcccgatgattgcgaatccccatagcaaacaaccaaccgaacaacgctcctcccaaatgggcaatatgacctccggcattatctccctgtatacttaaaagatctatcagtgctgtaaataatgccagatatatcatttttaccggacctatcagaaatatatagacctgctgctgaggggaatggaaacaaactgcaaatacaattgccataacagatgcagacgctccaatcgaccaagaggaaagacgagttatctggtcaaaataaggaaatatattataacacaagataaacatacctgctccgacaactcctcctaatagatatactcccgtcaattgacgttctgtaaactgattccgaaagagagagccaaaccaatacaaccacaacatgttaaacaaaagatggaaaaaaccaaaatgagtaaacatgtaggtaaaaagagtccaaggacgataaagcagataatccggatctgccggtacacccaaccattcaagcaatacatcgtaatatattcctttgaagcccatcagcagaaatggtatatataccacactgacaacaaagaacaacccgcagttaatataaatcaaacgcgtcaatgccgaaccgctccgaaatgatgggaacatgcttttccgaaaagcattcgaaaaatcttgtccataattactgtaatacatcatctgactaatagaattttttactccgcttgttccaccatctaatcaataaaaatccgaagagcattcctcccagatgagcaaaatgagccacattgtcccctgcagaattacgcatacccaaatacagttccaacaatccgtaacccactacaaaatattttgctttaactggtatcgggacaaacattaagaacaattctgtattcgggaaaagcataccgaaagccaacaggattccaaaaatggctcctgatgcacctaccatcggaacattagctttcaagtcaacaatacgtttgaatatctgcttgccagcctctatatattcaggggaacgttgattgtctatccaaccatctattgtagtccatacccatcctgccggttctcccaactgtttttttgcaaaatcggccaaaatatgaggatcaggcgattccaaaaacagatggtattgttcgtacatactatgcacttcaaaccaaccaatagcgctattaagcaaaccggcaccaaggccacaaacgaaatagtaaatcaggaaacgcttggatccccatacggattccaatatgcgcccgaacataaaaagggcaaacatattaaaaaacaaatgagtaaattcaatgcgtccatacggagatagcgatgcatgcataaacatgtgagtaacatattgccacggtgcccaatactgagactggggcaaatgtaatcccaacgtattatccaggtcgacatgaaacattttaccggctataatggtcaacagccacatagcgacattagccactaaaagcgctttgacagcaggcgtcaagcccgcaaagggacgataattctgcattattgttcagttttgggttgttgattctgctcatttcgagagcgaggacgattctgttggcgagaattgttgttcctctgctgacgcggctgtccctgacgagctgtcatattactatttccatttccacgcggattaccactcccattgtcacgaacattcttgtcacgaggcacattatcacgcgaagtgttttcacgctgtgcattctctcgggcattgttgttacgattgttattactgcgattacgattattgcgtcgtttctgctgttttttctcatcgaaacgattcagactttcctctccaacgccatccgtatatttgatatcctcctgtacttcaccattatcttccactgctttaggaggtataatacctttgctattcatagcaataatctcttttactctccgcaccggaatttgtataaaaatacctttaccttccttatccggagaataggacataattccaccaaaaatatcagtcttttggtggtagagcattccatcaccggtatttaaaggtacgtttgtcgatggaaaatctttctgcgcatcaacatatgcatccacctcaaaattcaggcaacatttcaatttgccacactgtcctgccagtttttgcggattcaaagaaatatcctggtaacgtgccgccgaagttgacactgacacaaaattggtgataaaagtagagcaacacaatttacgtccacaaggccctatccctccgatacgtccagcctcctgacgcgttccaatctgcttcatttcaatacgaatacggaatgtttcagccaatactttaatcaaagtacggaagtctacacgatcgtccgctatataatagaatattgctttcgttttatctccttgatactctacatccccaattttcatattcaaatgcagatctgctgctattttccgggaacgaatcattgtatcatgttccaaggctatggcctgctgccatttttcaatatcatgcggtttggctttacgatagactttcttcaaaggattccgctccaaatcaatccgtttcaaacgaatttgatctttcaccaattcgccagaaagagaaacaacaccaatatcatgtccaagtgcagcctctactgcaacaatatctccctcttttaacggtaactgtgacggattgctaaaaaatcccttacgagtatttttaaaacgcacttcaacaacttccggaatttccgttgctgcaggcagatctttaagccaattgtatacccctaacttaccagctaacaaacgatggtcaattgtcggtatttccggacgcggatgctttgtatgcatctgttgaacctcttcttcttctttttcttctttaggagctgagaattctccagcttcaatcgcaacacattcatctgcttcatcctcttcttcaagagttacgtcttcttcaatgacgagctcctcccgtacagcagacgtttcttccggcatattttgctccaaccggtccggctgctgctctatattgtttagttcttgagtatcattcataattcattattttgctgttatgtttacgttgcggcacaattttagttcggacgtatattctgcattactttaatgcataaatccgtaaatataattttactattgccgttccggtttatatcactaaaagcccgctcaagttcatctgtcaatgaaataatattcccttcatgcacatagggtgcaaaacgcacagaaaaacttttctcacgttctgtcatatagttcaatttatctaaatgaaaatttcgaataaaattttcacgaatcatacgtactgcatgcaaaaggaaacttttctgccgttcccgtcctattccagcaacctcgttcacccattcatttaccggaggcatttcccgattccaacaaagacgcatcaaactgataaacttttcctggttatatatttgttcctcactctcattcagcaatcgtaaagccctatgccaatttcctgcagctacatgggcaaattcatctgcctgagctttagacaagcctttctgaagaatcaattgctgagaaatatcttcttgatcaagaggaggtatattgattcgctgtaaacgcgattgaatcgttttaattaattgttccggatgctctgaaaccatcagaatcagtgttttatcaaacggttcttctataatcttcaacaacttattggaacactcatcattcattttttccggcaaccacacaatcattaccttatagtcggactcaaaagatttaagattgagtttgcgcagaatatttgcactttcttccgtatatatcatcgcttgagcattgtcatctactcccatttcggcataccattcttcttgcccaaaataaaccgtatgtgtaagcaaatgacgccattgattgatatactcgtcactaatctgacttttcccgtttttacgtactattggaaaaacaaaatgtaaatcagggtgtataagtttttgcattttccgacaagcaggacacattccgcatgcatcctcttttttatcgccggtacagaaaatatattgagcaaaagccaaagcaagcgcaagcgagccataccccgtattgcctgcaaaaagctgagcatggctgatgcgccccgcttggagtgcatgcaccagcctttgctttatatcttcatgtccgattacatccttaaacacccgaattactttatattcaaaataattaatttaaaatcagctcaattttattcccaattctttgaattgttcttccgaaatctcagatggagaatccaacattacatcacgaccggaattattcttcgggaatgcaatggtatcacgaatactgtcaagaccagcaaacatggataccaaacgatcgaaaccaaaagcaatgccaccatgaggaggcgcaccgtatttgaaagcattcaacaagaacccaaattgtttttctgcctgttctggagtaaagcccaagcatttaaacattctctgctgcatttctgtattatgaatacgaatagaaccaccaccaacttccacgccattgataaccatatcataagcatttgcccgcacagctcccggatcagattccattttatcgacatcttccagattcggtgaagtaaacggatggtgcattgcataaaaacgttgcgtttcttcatcccattccaacagtgggaaatcaacaacccacaatggtttgaatacgtccttatcacgcaaaccaagacgattacccatttcaagacgtaattcacacaattgtggaagcgtctttttcttctctccagaaagaatcagcaacaaatcacccggttttgcctgacaggcatccagccatgttttcaaatcatctacggtataaaatttatctacagaagatttaatagaaccatcttcattgtatttgacatataccaaacctttagcgcccacctgcggacgtttaacaaaatcagtcaactcatccaactgtttacgagtataagctgcacatcccggaacacatattccaccaatgtattccgcagtattaaatactgcaaattctcttgtctgagccaattgagtcaaattaacgaaacgcataccaaaacggatatccggtttatcacaaccataatattccatagcatcatgccatgacatacgaggcaactctggcaaatcaataccgcgtatttctttgaaaaggtggcgtatcattccttcaaaaagatttaatacatcttctctttccacaaaagacatttcacagtcaatctgcgtaaattcaggttgacggtcagcacgtaaatcttcatcccggaaacattttacaatctgataataacggtcaaagcctgcaaccatcaacaattgtttaaatgtctgtggactctgcggcaatgcataaaactgtccttgattcatacgagatggcactacaaaatcacgcgcaccttccggagtacttttaatcaataccggagtttccacttccatgaacttatatgaatccaaatagttccgaactaaatgagccatacggtgacgtaactccagatttttacgaacaacttgacgacgcaaatccaaataacggtatttcatccgaatttcatcaccaccatcagtattgtcctctattgtaaaaggaggaatttccgagttacttaacacattgattttctcaatcagaatctcaatatctcctgtcggaattttattatttttgctagctctttctaccacattaccctcaacttggataacgtattcccgtcctagttcgcctacttgctttttgatttcctcagtggcagactcttccaccaccaactgtgttattccatatcggtcacgaagatcgacaaaggtcatagcgcccagattacgaattttctgaatccaaccacttaatgtcactttttgatttacattttcaagccgaagctctccacatgtgtgtgttctatacatatcgtaatgttataaagttttctatttacataaagaaacggatgtccgattctaccaattggcgaaaatactaagaatttatgaaactattgaaaattaggaattgaaaattgcaaattattactctatctttgaggtaaatttataacaagcagaagtgaattatattgatatcattattttagtgctcattatacttggagccatcagaggttttatccgaggattgatcatagaagtcaccaccctattaggattggcagcgggaatttatgctgccatgaaatacgcttatctactagaaaacgtcctaaaagattttctagatatatctgcaaaatattctccatatatagcactcagcatcacctttatactagtagttatttttgtttttgtattaggaaaattacttacgaaacttatagatatcatactcttgggatttgtcaacaagctactcggagccattatgggagctatcaaagtaaccctgcttctctgtgtactaatcataatagcaaacaccttaaatgaaaaattcctattaataagcgaagaaacattggaaaagagcgtattattctatccttttcttaattttgcagagaaaatatactattcgatacgttgctaattatagaatagatcgaatacaacaagaatgtaataacatccaaaataataactcaatgaattttgtagatgaattgaaatggagggggatgattcacgatatcatgcccggaaccgaggaattactttccaaaggacaaacaacagcttatgtaggtattgacccgacagctgattctctccatgtgggacatttagtatcagttatgatgatgaaacatttccaagtagctggacacaaacccatttttatcattggtggagcaaccggtatgattggcgaccccagtgggaaatcacaggaaaggaatctactgacagaggataccatacaaaaaaacatggcaggcatcaaagctcagttatcacattttattgacttcaattcaacagcctccaatgctgccattatgcttaacaattacgactggatgaaacaattttcatttttggatttcatccgagatgttggcaaacatatcacagtcaactacatgatggctaaagactctgttaaacgccgtttaaacggagaatttgctgatggcatgtcttttaccgaatttacttaccaattagtacaaggttacgattttctacatcttcgtaaaaattacaattgcatgttgcaaatgggtggatcagatcaatggggtaatattacaacaggcaccgaattgattcgccgcaaagaaggattggaagcatatggtctgacatggccattaatgactaaaagtgatggtaagaaatttggcaaaacagaatcaggaaatatttggctagatcctgaacgtacttcgccttacaaattctaccaattctggctgaacacaacagacgaagatgctgcacgttatgtaaaaatctttactctgttacctccggctgaaatagatgcacttatagcagaacatgcagaagcaccgcacctccgtaaattacagaagactttagcaaaagaaatcacctgtctaattcatggagaagaagcctataattccgccttggaagcctcacagattctttttggcaacgcaacttctgaatcactgcgaaaaatcgacgaacgaactttcttgtccgtttttgaaggagtgcctcaatttgaaatttcagcaccagatttaaaggctggtatctcaattgtagattttctagcagacaagacatcaatcatgtcatcaaaaggagaagcacgccgtgcactaaaatctaatgccatttctatcaacaaagaaaaggttaccggagaagatgcaattatcaatgaaggacatttgattgacgggaaatatattcttgcccaaagcggtaaaaagaattacttcctaatcattgtaaaataaaaagaatagccgcttgttaggcggctatttttatatttactcttcaacctcaaaatcctgatataaaaaatcattataggggaaacgtgctgaatgaatatccttcactattgtatataatttttcttttaactcttcaatattatcttttttcgcagctgaaatataaacagtctcacaaccttgtttagacatccacatttgttttaaatcttctaggctgtaattctctcgcaaaacgggagtcaaatcatcatcctccttctttacatattgaaaggcatctatcttattaaatacaataatagtaggtttagactcttttatcagttctgccaaagtctcatttaccacctgcatctgctcttcaaattgcggatgggatatatccacaacatgtaatattacatcagcttctctcacttcatccaacgtagatttaaaggattccaccaaatgatggggcagctttctaataaatcccacagtatcagccaataatagaggtacattttttatcgcaatcttacgcaccgtagtatctaatgttgcaaacaatttattttctgcaaatacgtccgacttactcaataaattcatcagcgtagactttccaacattcgtataaccaactaaagctactcgaactaacttaccgcgatttttacgctgaatcattttttggcggtctattttagccaattcttctttaagccgagtgattttatctcgaatgattcgacggtctgtctctatttctgtttctccagggcctcttaaaccaatacctcccttttggcgttccaagtgtgtccacataccagtcagtcgaggcaacaaatattgatattgcgctaactccacttgcgtttttgcatgagccgtacgcgcacgactagcaaaaatatccaatatcaaattcgtacggtcaagcaccttgatgcctttaaacatcccttcaatattacgcaactgcgtaggggaaagttcatcatcaaagataatcatatctacttcatgctcttctgtatacgcctgtatttcctctaattttcccttgccaataaaagtagcatgtaccggtttatccaaattttgagtaaaaatctttactgtttccgcacctgcagtttctgccaagaaagataattcatccaaatattcgcacatttgattataagttacatctttagactgcaaggcaactcctactaatattgctttctctgcttcttttccggtataatacatataagaattagttgtaagtacaaaataaagggctgacacaattatgacagccctttgtatttaaatcaattcgtcttttagttgttagacaactggaagttaatcggcaatgtataggaaactcttacaggtttacctctctgttttccaggtttccatttaggcattgcttttacaactcgaacagcttctttatccaaagatgcatctacacctcttaatactttaacatcagtaatagaaccatctctctcaatcacaaattgaatatataccttaccttggataccattctccatagccaatacaggatatttcacattcttggcaatccatttttgaacattaccaccggggaacatcggcatatcctcaacgacaacaaagacctctgaatctccagtatcttcatctccatattctccaaattccattgcatcggttggagcatccgtattttcagaagtatcatcgacatcctgaatttcaagctcttcatcaatttgagtatcatcctcaacgatatcaatcaagtctgtcaatttcggagctggaggaggtggtggtggaggttttaacatttgctgtgtaatcggaatgatttcctcctcaatctgttcttcagcaaccgtctggaactgacttacttcctcagaagaagatttccattcaaaggcaaatagcaggattgctaaagccagagtaaggccgatctcaaagaagactccttttttgccttcaagatctgctttctgtgacttctttacttccatgatataaattttgtgttgttatttacaattcattcaacggggtaaaagtaaaaaaaaatggaatagcaaacaacatttcaaacgttttttttgaataaaacgttaaagtcaaaatcccgcctcagccaatccttaattaatttaacatctacactttcatttgcagattccaataccatatcgtacttttgtgcaaatgagtataaataaacaaccatatgctacgtatttactatttaaaactatccgattatcaagcatatcccgaagaatatttttttcctcatgtaagcaaggatacttgggaatccacccgacaattcctcaataaaaaagttcgacaaaccaaattattaagcgaaactttaacccgacaactgattaatcaaacttggggactatcttccaaagattatcagttagtaaaaggggaacatggaaaaccctatttaaaagtacaaaacatatctgcacattttaatatttcacattccggtgattatattatatgcgccatcagtgatcaaaatgtaggtattgatatagagttatgtggaaaaccacgtctgaacgtggctaagcgtttttttcatcctcaagaaatagcactactaaataaaacgacagatgaaaaactacaacaaaaattatttttcaatctatggtctgtcaaagaaagttatttgaaatatacaggaagcgggcttagtactcctctctcatcatttgaagtttgctttacggggaataatattacattaaaaaaagagcattccctactacccataatggttcaggaatgccctatagatcctaattacagcagctttgtttgctgccaatcaatagagtcttttacaatcgacactcttaagctttgatattttcattctgtataagccattctgcgatctgcacagcattcaatgcagcacccttctttatttggtctccaacgacccagaatgtcaagccattttcatctgccaaatctttacgaatacgccccacatagactggatctttgccagaaagaaataaaggcataggatattgcttatcttgaggatcatcctgcaacacaatcccttctgcttttttaaatgccgcacgagcttcctctactgttaaaggacgctccgtttccagccaaatactttcagagtgagctcttagcgcaggaacgcgcacacaagttgaactcactttaatatctgaatgcatgattttttgcgtttcattaaacattttcatttcttcctttgtgtatccattatccgtaaacacatcaatttggggaatcaaattaaatgctaattgataagcaaatttttcaacagtaggagtttcacctgctaacacctgacgatattgagcatacaactcgtccatcgctgcagctccagctccacttgcagcctgataagttgctacatgtacttttttgatatgcgacaatgattctattgctttcaatgcaacaaccattaatattgttgtacaattaggattagcaatgattcccttaggacgattcagagcgtcctcgggatttacttccggcacaacaagaggcacctcattattcatgcggaaagcacttgaattatctatcatcacagcgccatgcttcgttatagtttcagcaaactcccgcgacgtgtcacctcctgcagaaacaaaagcaatatctacatccttaaaatcatcgttatgctgcagtaattgaactgtcaactgcttatctttgaacatatattgcttgccggcactacgcttggaaccaaacaataccaactcatccattggaaaatttctttcttccaatacttttaaaaattcttggccaacagctccgctggctccgacaattgcaactttcatatcatttatcttactgctgttaataacttcatccaaataattattcctctgtggaagctaaccttttactttgacgcttacgctctatttcatctaatatgattttacgcaaacgcatagaatgaggtgtaacctctacgtattcatcctcttgaatatattccaatgcttcctctagactaaatttaacaggaggtgctatgttcaccttatcatcagaaccactagctcgcatatttgtcaatttctttgacttacaaacattgattacaatgtcatctggacgagtactttcacctatcacctgccctgcatatacagtttctccaggttcaataaaaaatttcccgcgatcttgcagcttatttattgcatatgcataagtatctcctgtttccatagcaatcaacgagccattaattcgcatttcaatctctcccttatatggttcgaaaccttttaaacggtgtgctataattgcttctcctgcagaggctgtcaacaaactgctacgcaagcctataataccacgagacggtatatcaaaatccagatgcacccgttcatcacgagtttccatattattcaatacaccttttcttttagttaccatctctattgctttgccagagaattcttccggaatatctatcgtcaattcttctaccggttcacatttctgtccatcaatttctttaatgataaccttgggctgtccaacttgaagttcatatccttcacgacgcatactctcaattagtacactcaaatgaagcactccacgcccataaacaataaatgaatcagcacttaaccctggttcaactcgcaatgccaagttcttctcaagttctttatccaaacgttcttttatatgacgagaagtcacatattttccatctttaccaaaaaatggtgaattgtttatggtaaacaacatactcattgtcggctcatcaatcgcaataggagtcaatgcttcaggattttcataatcagcaattgtatcaccgatttcaaagccttcaataccgacaattgcacagatttcaccagactcaacttcatccactttctgtttttccaatccctcaaacaacatcaaatctttaattcggcttttaatttgtgtcacaccatcacgtttacataaagtgatgggcatccctgctttcaacttacctcgcgtcaacttaccaattgctatacgaccgatatatgatgaatattccaaagaggttatcatcatctgtggtgttccctcagcaacaaccggttctggaatatcttcaataattgcatctaacaatggagtaatatcatctgtacgatgtttccagtcagtagacatccacccttgttttgcactaccgtatattgtcttaaaatccaactgttcttcgctcgctcctaaagaaaacatcaaatcaaacacctcttcttgtacttcgtccgggcgacagtttggtttgtcaactttattcacaacaacaatagctttcttacccaagcctaatgctttttgcaatacaaatctcgtttgcggcatagtcccttcgaatgcatcgactaacagcaaaactccatctgccatattcaacacacgctcaacctctcctccaaaatccgagtgacccggagtatctataatattaatcttataatccttataatgcacagacacgttcttagcaaggattgtaatacctcgctcacgttcctgatcattattatcgagaatcaggtctccgctttgtttttcgttctctctgaattgctttccttgcaatatcatcttatccacgatggttgtttttccgtggtcaacgtgcgcaataatggcgatgtttcttaatttccgcattttatctttattttaagtatgcaaaattacaattatttgttgagaacgaaaaacaaaaaaagttgaaagtcagtaattctaactctcaacttttctatttttaagaaaaaagcctcttaaatgcttattctactctattagcacttcccaatacattaattgttttatgcttataaagttcttttaaagcatcacgagccggacctaaatatttccgcgggtcaaattctgccggtttcgttgcaaacacttcacggacagccgctgtcattgccaaacgtccatcagaatcgatattaatcttgcatactgccgaagttgcagccttacgcaattgctcttccggaattcctacagcatcttttaaggctccgccatatttatttattattgccaccttatcctgcggaacagaagaagagccatgcaacactatcggaaagccgggaatacgtctttctatctcctccaagatatcaaagcgtaatggaggaggaaccaagattccatcagcattccgagtacattgctctggtttgaacttattagcaccatgagaagttccgatagaaattgccaaagaatccactccggtcttctttacaaaatcctcaaccatatcaggacttgtgtatacactttcagcagcaactacatcatcctcgatacctgctaacacaccaagttctccttcaacagtcacatcatattggtgagcataatccaccacctttttagtcaaagcgacattttcttcgtacggtagggcagatccatcaatcataacagatgaaaaacccatttcaatacaagaaacgcataattcaaacgtatcaccgtgatctagatgcaaacagataggaatattacatcccaattcttttgcatactcaacagcaccttgagccatatacctcaaaagagtctgattggcatatttacgagctccgcttgaaacttgcagaatcacaggagattttgtttccacacaagcagaaacaatagcctgcaactgttccatattattaaaattaaaagcaggaacagcatacttaccttccattgcttttttaaacatttctctggagtttaccagacctaattctttgtagctaaccatgatttgtagtgtattaaagttaatttatttgcgctgtccgaaaattcgcaacaacataataaagagattaataaaatccagatacagactcaatgccccacagattgccaatttttgagtaaattcattgtcttgtgccgatgccaacgctttaatcttctgcgtatcccaagcaatcaatccaacaaacaccaaaactccaatataagtaacaatccaatttaacattgtactatgaagaaatatattaaccacagaagctataatcataccgattaaagccatgagtgccaaattacccatcttagtcaaatctctctttgtcacaaatccataaatactcatcacagcaaaagtgccagctgtgataaaaaaagttgaagctatagactccgctgtaaaagctaagaaatagacagaaaaagtcagtccagtcaatacagaatacagcataaacaacccagacaacatggacaaactaaaagatgtaacttttgcagagattgcccagactaagccgaattgagctatcaatattgcccaaaataaaaaactatttccaaaaatcacctccaacaatctcggacttccagcaaccaatgaagccgtacctcctgtcaataacaatgctgtacacatccaaatgtacacacttctcaccaatgtattttctacggcaacggctccttgatacccttttgccgacaactctttttgatattccataatattatatttactaattatttaccattgtatttcctgtaaaccatgttcacgcaaaaaagcatttgtccgactaaaatgatgatttccataccatcctccccgatttgcagcaagaggagaaggatgtaccgcttttaaaacaagatgtttattggtatctataaatgctcctttacgttgcgcataagcaccccataataaaaacactaagtgcagcttcttatcagcaattttcctaataacagcatctgtaaataattcccagcccttattttggtgagatccggcactatgcgcacgcaccgtcaacgttgcattcagtaataacaccccttggtctgcccaacgttctaaattgccagactttggcaccggtatccctaaatcattttctatctctttaaaaatattctgcaatgaaggcggaaaatcgacaccttccggcacagaaaaagagaggccatgcgcctgccccaaaccatgataaggatcttgtcccaatatcaccactttggtattttccacagagcaatgattaaaagcattaaaaatcaaacgcccaggaggatatatactaatatcacgcctagcatactcccctcgtacaaactccactaaatcagaaaagtaaggtttatcaaactcatcttccaaaagagctttccaagattcttcaatttgtacgttcatatcaacttttgctcttaattaaaatactaattaggaatttccactttaatttcaaatagttttggccaccgttttcctgtcaaataaaaagttttactaaccggattccaagcaattccattcaaaacatcgtccttgtcatccagtttccctctttctgccgccgacaataaaccacttaaatcaagatcgtatttcacagctccacttttaggatctatagccacaatcctatctgtcaaccatacattcgcccaaatcaatccaccaacatattccaactcattcaactggttaataggcccaacattatcataaacctccacctctctcaagatattaaaagtagatggcgctatatgataaagtttattcgtaccatcactcataaccaaataatcccccatcgtcgtaattccccaaccttccgagccatattcaaaagaagattccaaagaaaaactcttcaaatcatacacaaaccccttacgagaacgccacgtaatttgataaattttgtctccaaagatagttatcccctctccaaaatattggttatctatacttaatactgaatgtattttcccactattcatgtctacttttcgtatagaagactctccatactgacctgtaccctcatacataaagccatcctgatatgtcaaaccttgagtataagccttagagtcatgaggataagtcttcaatacatgatacttacatctaatcggtgcttcagctggtttcacccgtattgtgcctgttgccacaccctccttattatccggatgccatgcaataacctttaccgtcatcaaacccaccttactatttcctatcggcaacgaaaagcgagtttcaccagatcccaaacgagcaacctcgtgtccatcaacataaatagcagaagaatccactacaaaccgattcttactttcaaattccacgaccaactcatcaccaaaagaatacaattgatttttttctggctgcaataattttaagctatttacatacttcacctcactcttactcgcttctacaacaacctctttattttctttcttcttcccattactacctccacaagaagtcaacaaaagcaaacaaagcaaatagtaccaataagacatatcattctaactttctaattcccattcatagccctctttcgtatcctttacaagaacaccagcagcctttaactcatctcgaattttatcagatgtagcccaatctttcttctgcttagcctctgtacgaatggtcatcaccatatccaaaatcttacccaacacctcatggtccttacttaccgtttctgcttcagctttaagccccaaaacatcaaatacaaaatcgtggtataatttttttaatttgtccaaattttccacattgattttctcactaccagcaaccaacgaatttataattctcacgccatcaaacaaatgagaaatcaaaatcggggtatttaagtcgtcattgattgcttcaaaacattttgcactcaaagcatccacatccacagtattgtcagctccagcctttactttctccaatgcattcactgcagccatcatacgttcataacctttttgcgcagcttttaatgcatcattcgaaaagtcaagcggactacgataatgcgcctgcaaaataaagaaacgaacagtcattggcgaataggcttgctccagtacttcattttcaccagagaacaattgatccaaggttataaaattacctaacgatttgcccatttttttaccattgattgtcaccatattattatgcatccaatacttcacagcctcatgaccataagctgcagtactttgggcaatctcacactcatgatgaggaaattgcaaatccaatcctcccccatggatatcaaagcgatctcccaaatatttctggctcatacaagagcactccaaatgccacccgggaaaacctgcaccccaaggagaaggccaacgcataatatgctcaggcgttgcttttttccacaaagcaaaatctgcaggattacgtttttcttcctgtccatccaactggcgagtattggccaacaactcctccactctacgtcctgacaactttccgtaatcatactttttattatacgcctccacatcgaaatagatgcttccatcactttcgtatgcaaaaccattatccaatatctttttcaccaactccatctgctcgattatatgaccggacgcatgtggctctatgcttggagacaatgtattcaactgttccatatttttatggtaacggttagtatagaattgcactatttccatcggctccaaccgctccaattttgccttcttttctatcttatcctcaccatcatcactatcatttgtcaaatgtcccacatccgtaatgtttcttacatatctcactttatatcccaaatactgcaaatatctgaacaccaagtcaaatgtaatagcaggacgagcatgtcccaaatgcgcatcaccataaacagtcggtccacaaacatacaatcccacaaacggaggattaataggctcaaacacttctttacgccttgaaagagtgttgtatatactcaatttattttccattttaatacatattatttattcggtaaagataaaaaaactttcatagataagaaagcaaaaacaaggtaataaaataggttaaaggctgaaagtccatcacaagaccccagcctttaacctcatacatttataaaatccgtctagattacaggattaacttatagccttttccatgaacatttataatctctacagaagggtcttttttcaaatgcttacgcaattttgtaatatacacatccatacttctagcattgaaataattgtcatcagcccaaatatttttcaatgcataatttctttcaagcactttattcacattcagacacaataatttcaacagttcagactccttcgtggtcaacttctgatcttctacgccatcgcctaaagtctgtttctttgagttaaatgtcaattttccgattttaaaaatctcctgttcgtcttctggtttcaaacctgtagaacggcgcaacacagcttcgatacgcagcaacagctcttccatagagaatggcttgctcatatagtcatcagctccgattttgaaaccttccaaaacatcctctttcatattcttggctgtcaagaaaatgattggaatttcactgttaatttgacgaacttcttttgccaaagtaaaaccgtcttttttaggcatcatcacgtcaaagatacaaatatcaaacggctgattcaaaaaagcatcataagcaatctcaccatcctcacacaatactgcatcaaacccctttgctctcaaatattccttcagaagcataccaagattagtatcatcttccgctaacaaaatttttattttctcttccataactattaagtatttaattcaaatctttgaaaaggtacgtatttagaaaaataaagttctcttcaccttttgtttttttgcagccaagggcaaaacaacatcaaaacggcttcccttaccttcttcactttccacctcgatatgccctccatgagcctccactatggtttttacataagacaagcccaaaccaaagcctttcacatcatggagattaccagtagaaaccctatagaacctttcaaagatcatcttttgttcttttactgcaattcctatgccattatcgataacacttacgatgatattatcacctttatttttagtactaacactgatctctggtgttttagcacaatattttattgcattatccaataaattcgatacaacatttgtaatatgcacctcatctgcatacacttcatcccgttccgcctccagataacaaaacaacttaccccttttatcctctaccctcaagctaaatttcgaagcaagcccctctactacttcatttaaattaacattctttagcttcaatctcatacgggtctctgtaaatagtgccgtttgcaacactttttccacctgaaatgtcaatcgcttactttcatcccgtataattcccgccactctatcaacgctttccgaagaatgactcacagcaccatctttcagcatttgtgcagccaaagatattgttgatatcggagttttaaattcgtgtgtcatattattaataaaatcattcttaataacagacaattttttttgctttacaatctccattatacaaaacacgaaacacgaaaccaacaacaacgtaatcaacaaactaggcaacaacatataaattgatgaaaccaaatcatgagactgaccggggaatattataaatagtgttgccccaccagacacttcattaattgacaacctccaatgatatgaataatcagaactactgttaaaaaaatcaggagacatcaaaataaaacgatctttttccttaactgcatattcaaaatcatttgttacaccattttcatttaaacatcctctgataatatttgcaaaatccaactcctctaattgaccttccaaatttggagcatattgttctttattaacaaccaccaagtcatattctttcccaaatttctcctttaatgcctgacgcgacttctctatcgaattcaacaagcctttatttcccttctgcccaaaagcctcactcgtcaatactcctttttcgccatattttaatggagaatccgtataatcaattacgatattcatattttgacttgaagcctctattcccaatccaaaaggcacttcatgcaccattttccccggtttttcatagggaatactccttcttttcttcgcctgttccttcgtctgaatctgctcatcaagaatattcaatgcctgatcaacagacttatttaccaaataatcaaactgagcttttttcagtctaaaagccgtctgaaaatatcgggcttgcgtaaatatcaagcccaacaaagcgacgcccataacaacgcccagtatgataatttgcttttttctcatacccacaaatttaacatttccagattacaccacaacagagttaacagagtttaaccttcaaagcatttttacaacatccacacaaaaactttatcaaaacaaacttatctgatcccctatccctttatttatattttttcctaaatgcctataagctaattctgtaacttctctaccacgcggagttcgctttaaaaaaccctcttttatcaaaaaaggctcatatacttcttctaatgtaccggcatcttcaccgacagccgttgcaatagttgtcaaccccacagggccccctttgaatttttcaataatggtcaacaaaattttattatccatctcatccaaaccatacttatcaatattcaaagcctccaatgcatactttgtaatttcatggtcaattgaaccattacctttcaccatcgcaaaatcccgcacccttctcaatagagcattggcaatacgtggcgtacccctactacgcgatgcaatctctcttgccgcttgagaagttataccaatatttaaaatagaagccgaacgattgacaattcccgtcaaaatatctatgtcataatactccaaatgacaattaattccaaaacgagctcgcaatggagctgtcaaaagaccactacgagttgttgcccctatcaaagtaaaaggatttatctgaatctgaacagaacgcgctgcaggccctttatctatcatgatatctatacgataatcctccatcgcagaatacagatattcttcaactacaggactcaaccgatgaatctcatcaataaacaacacatcgttttcctccaaattcgtaagcaaaccggccaaatcaccaggtttatccaatacagggccggacgtcacctttatcccgacccccagttcattggcaataatggtagataaagtcgttttacccaaaccaggggggccatgcaaaataacatgatccaacgattctccccgcatctttgccgccctcacaaaaatttcaagattttcaacaatcttcttttgaccttgaaaatctccaaagttcaacggacgcaaagctcgctcaaactcccggtcagattccttcaacgtatgatctctaatatcaaattcacccataaagcatctatttctgttttacccctcttcaaagttgcaaaattaatcttttcccaataaatttataacatcttcctctatcttgcaaattggcaaataagcgccatattttatattctgccgcaattcataatcaacattataacgcccacgatacacctccttcatcatttcccgtgacaccatctgccctttccgagcctttcttaacatcaatttgcaaacttccttacataacaacaacaccaaatcatacaaattatgcccccttacaaacaaataaacattatccggtgtcaatcccaattcacaatacctctctttgacaacatccaaatcagcattcggatacttacatcccaaagcctctgttttcttctccactctcatccgccactcctccaatacaggctcaccatgttcactaatcaaaggcctccttttcgaattagcgagacaaagatacgaatcaaactcagcctgactgaacaatacaggatctgcattttgaaaatacagatgccacacaaaaagatcatataagatattcgaaaaagtcttcaaaaaacgctgaaaatcaaacactctgtttttcatatgagtagcccgactacacacatcatccaatccctccgcaaaacaatgatgattttcaaatgaatacgtataagtctgcaaaacaaaatgttcaacatccattttcctagtccgcaacaaatagcgataatcactatcgatgcagataaaaaaattgggattcaaataatcaaaatatttcagacattgcgtcaccccgaatgtttccctaccgaattcatttcttgaccctgccaaaaaatggaatttatcattgggacgaaaatgtttcaatatagcgccccaaaaagcaatatcatctttattttccacatgcacagcagccctacaccgaaacattttggcatccaatgcaaaacgccgagccgcagccgaatagtaagccgcccgttctgcagctcccattaccgcttctttttttgaacagcctcccagcatatacctttcactttttcatcttaatcaaatcctctacaaaaaccagtttatcaccccatccatccccaaacagacttggagaatgagtagacgtaataatttggcaattcggattcagacgtcgtatttcctcaaacaatttatattgccactcaatatgcagagaaatctccggttcatccatcaataatatgtaaggttgctcttccatcaaaaagacccgcatcaaaattaacaacaattgtttttctcccgaagacaatttatacaatggaatctcttcgccatcatcaataaaaatcaaatgatttgtatgaggatctatttttatcaccttctgtgtcttcataaacagacggtctaccgtctcaaacaacatttggatacgcctgttgatacaatccgcctctttcgggaaattagttgctttcaaacgataatcagaaaaagacggattctttcctccaatatcatacacaatggtatgcaattcattatacaactggctatattctcttccagcttttggtctatctctaaaaggaacatcaaatgtactgattttttgatattttactccttccaagacccctttcagttctgatgccgacatcttctgatgaaattccacaatccgtcctcccacatccatcttcacatcaacgccgtatgccttcaattttttaacatcggccatcattacagaatcaataatattaaacaaggtagttttaccgctaccattaataccgattaaaatattcacatccggattcaacttctcccaacaaaaatcatatttcctccataaatcccgaatttctatactgcaaataacattatccataagcccaaccatttaatttaatagtatacgacaaacttacgattatttttgtaattttgcgcactaaaattacagatactcaaacatgaaagtaaaaatattattcctaaccttactcttcatccccgcatttctgtatgcacaaacaaccaaagacacgctcatagtctatccatcagaaaagttttccgccaaacagctgattctccccgcctcattaatcgcagtaggctcttggggcataaataatggttggttcaacaaaatcaacaataaaattcaaaacaaaatgattgattggcgagacaataactacatccatattgacgattatatccaatatttgcctgtcgcctctcatttaggtcttggactgttgggagcacaagccaaacattctttcaaagaaaggcttgtcatcacagccacctcctacctggcaatgggcataatcgtcaggtcactcaaacttgccatcaatgaaaagcgtccggacagcgaggcacataactcattcccttccggacacacagcaaccgttttcatgggagcagagcttgtccgcaaagaatatggtatcggctacggcatcggagcttacaccattgcctgtggcgttgcgtttctacgattatataacggcagacactggtttaatgacgtcctcgccggagcaggtatcggtatcataacggcacaactcggctattggctgctgccactcaaccgcaaattattccgtctaaataaaaaaaatgcaccaacgatcattgcctgcccttactacaaccctcaacaaaagacaaccggaggtgcattcgctctctatttctaacacacatcaacacaatcaaccatgaaagcactttacactatcatcctactaattttctcaaacatcttcatgacctttgcctggtatggtcatttaaagctcagcgaaatgaaaatcaccacaaattggccactctttggaataatcttactctcttggggtatggctttttttgaatattcattacagattccagccaaccgcatcggatttcaaggcaacggcggaccttttaccttactgcaattaaaagtcattcaagaagtcatcaccctcatcatttttgccgtattcaccatggtattctttcaaggagaaaccttaaaatggaatcatttggctgcagccgtatgccttgtcatggctgtttatttcgtctttatgaaataaaataacatttttacgtgttaaatttattgcttattattgggaattatatgtataatacatacatttgtatcgccattttatatgacaaatacatatatgctacatacatattaacaaataatgcaagaaaacatagacatacttcgttctctgaactatgaattagtcaagaacctcggattattcaaaagacgcgctaacatggcattcagtcagcgccacattctctatcatatcgacaaccaccccggactatccatccgcgaactggcagccttactatatgttgaccactcaaccatgagccgcaacattaaaaaaatggaacaggacggatgggtagaaatctaccaggacgaaacagataaaagaagaaaaataattgccctttctccagagggaagcaaactcttaacagaggcgacagaatcgatcaaccagaccatcggccaagcactgaatctgctcacaaaagaggaagttgaggccattatcgaaaacgttcgcaaatacaatcatgctttagagcaacgataaaaatcaaaataaaatcatggcaaacgaaacacttatcattacccaagacgaaatcaaacaggcgctggatttaaacgactatatatccattatagaacaaacacatgcctgccatgcgaaagggcaggtttacactccggatttgctgcatgctgacgtacatcaaggagaatttcatttaaagactggaggattaatctatccggacggagaatattatggtgtaaaaatcaacggaggttttttaaataacacccgaaactatcaactacccaatattttaggtatcatatacatctgcgatgcaaagaatggatatccattggcggtgatggactccgtaaccatcagcaaattgcgcaccggagccgcctctgcagttgcagccaaatatctggcaccgcaacaaccgatacagttgggtgtatttggctatggctcacaagcagaaattcaggccaaagccatttccaaggtacgccagttggaacatatccgcatcagtggaagaaatatggaaaaagcgacagcctttgccgcccaactccaaaaggaatttgatataccggttacttgccattccctggaagagaccgcccgttccagcaacctgattattacagcaacaccagcccgtggctattatctgaaaaaagaatggattaatcccggaactttcatcgcagcagtcggtgcagacagtcccgacaaacaagaattacaaccggaacttgtagcatccgcaaccatcgttgcagacattaaaagtcaggtatgccgtgtaggtgagtcccagcatgcactaaagcaaggattgatcaccccggaaaacatatatgccgaattaggagaaatcgttacaggacaaaaagcattgccttcgaccaacggcattacgatttatgattccacaggaaccgcccttcaagacatcagcattggtgtcaccatatacaaaaaactaaaacaaacagaatgtactaaaatcaagttattctattaaatacaaaaaagcacctataaaaccacaatttatatcaatcaaacacctataatttatgaagaaaagacagctttacagacgaaacgtctccggagtatgcttggcatgccacatcgtattggcttctttgctgtttcctgtaggcactttcgcagcagaatcaaatgcaaacggattacgattatctgctcctcaagctcagaatgtcagaattattaaaggtattgtcaaagatgccaacaacgaacccctgcctggagcaaccgtacaaatcaaaggaacaaccaccggtgtcgtgactgacattgacggaaaatattctctaacggttccatcagatcctaatgccactcttatcatttcttttgtcggcatgaaaacaaaagaggtaaaaatcggcaaacttgaaaacatcaacgtcactcttgaagaagaaagccaggcattggaacaggtggtagtgaatggtgtcttcgaacgtaaagccaatacatttaccggttctgtacaaacattcgacaaagaacaactaaagcgggtaggtaacagcaacgtattcgaatctctgaagaacctagacccttctgttatgttcttcgacaacatgtcgtatggttctgacccgaacaccatgccttctatggcgatgcgcggaaaatccagtctgaacttaacagatacagaccttagagcttcctatcaaaacgaccccaacgctccgctgttcatccttgacggattcgaagtttccatccaaaaaatcatggaccttgatatggatcgtgtcgaaagtcttaccttattgaaagatgcctcggcaaaagcaatctatggttcaaaagcagccaacggtgttatcgttattgaattaaaaaagaacactgacggtcaattaagagtaacttataatggaagtgtttctgttgaaatgccagaccttacttcttacgacctttgtaatgcagaagagaaactggatgtcgaatatgcatacggaatgtacacagaccccaatgccaacttcgacaaccagcgcaccatgaacagaatttacaaccagaaacgtcaagctgttgtgtctggaatcaataccgactggatttccaaaccgctacatgtcggtgttggtcataaacacagtctgtctgttgaattgggagaaaaagcactaaaggcaatcatcgacctttcgtacaataacgtcaagggcgttatgaaaggctcagacagaagcacgatttcaggagctttgtccttgcaataccgccacaacaaattcctgttccgtaaccaactgaccatcacttcgaacaaggcaaacgattccaaatacggaagttttgacgaatacacccgcttaaatccttattatagtccatatgacgaatatggcaacttggtagaaaacatattccctcacatagaaaagagtaatagtgtttcaacaaacgcttggtttgaacaaatcagttttgaagccaatcctctatggaatgccaaactgaacactttattacagaacaaatacattgacgttaccaacaatttcgacttgcaatggtttgttactaccggactgaaagccacagcccgcttcggactgacagaaaagagaagtcgcaaagacaacttctatcctgccaaccatctgaaattccacgattatgtagaagaccgtgctcttgaaaaaggttcctacgaattggagcaaggacagcaaagcgacctttccggtaaattggacatccaatacaacaaaaacttcaaagaagttcactctgcatatatcaatgtcggcttagatattgccggaaaaaaattcacaacaaacgttcaacaagcacaaggtttcccaagtgacaagatgaacgacctgatgttcgcccgtcaatggactgaaaacaccaaaccgacaggaaccgaacaaacaatccgcgacttcggttactatctttcagccaactattcatacgacaaccgtatcaacattgacggaaccttccgtcaaagtgcatccagccaatatggagcagacagccgctggggtaaattctggagtgcaggagccagttggaacatccacaacgaagattggttagaagactccaatatcagccaattgcgtttaagagcatctgtcggttctaccggttctcagagcatggatgcctacaatgccattgcttcttacgaatattttctggacaagacttacgaaggacttcttggagcacagctaatcggaatgcgcaacccggatttaaaatggcaggaaaaaatggaatacaacttcggtgttgacttcaactacaaaaacagatatagtctacagttcgaatggtaccgttccatcaccaacaacgcacttaacccattgacgctggttccttcaaccggatttaattcagtatctgaaaacgtaggaaaaatacaaaacaccggtttcgacctgaaggcttctgccaccgtatggcaaaacccgaaagaacgttcatacctgacattcaatgtcatgatttcaagaaacaagaacatcctgaaagagatttctgccgccatgcgtgcatacaacgaacagcaaaacgcacaatttgccaacagcaatgcagacaactatgatcaacgcaaaccgctgaacaaattctacgacggagtatccatggatgctatttgggcaatgccgtcattgggtatagaccctgccaacggacgtgaagtattcctcgtaacagatgccaatggcgttaaacgcagaacttatacatacgacgccaatgctcaagtggtttgtggagatgcacttccgaaattccagggtaatggaggagtcagcttccaatacaaaggtatcggtttcaacaccgttctcacctaccaatacggagcaaaaatgtacaaccaaaccttggtcgacaaagttgaaaatgcaaacatgaatgacaacgtagaccgccgtatcttcaccgaccgttggagacaaccgggagaccacaagccattcaaagccattggccaggtatatatatcagagaaagaagcatacgctacagacgaaatgacaagaccgacctctcgttttgtacagaaacggaatgaactgcacatttcatccgtacaattatcttacgacttcttcaaacatgccttcattaaaaaagccggtttggaaagattgcaagtgaagtttaacatcaacgacctatacactttctcttctatcaagattgaaagaggaacttattatccgtttgcaagaacatttaatgtatccttgagcgcaactttcaaataacgactaaatccaggatctatgaaactaaagaatattatattaacaggaattgcagccatcgggtttgcatcatgcaatgactggcttgatatacagcccaagactgaaatcaaattggacaaaatgttcgaaaccgaatcaggcttcaaaaatgccttgattggaggctatatcatgatgaccgattctctgatttacggacgcgagatgaccatcacctttatggatgtacttgcccaacaatttgaggtaaaaggaacaggcaatccatattattatgccaaattctacgactatacacgttataaaagcactaccgaaaatttttggataaaaaactatcggattattgccaatatgaatgccattctggaacagattgacggcaaaaaagacattctccatccgactcactacgccaatatcaaagctgaggcattggcattacgaggattcttgcatttggatctgctgcgaatgttcggaacatacggcacaacggttgacccatccaaactggaccaactatccattccttatgtaacggaatactctaaaaacatatcagaacaattgagtggcaagaaggtactcgaattgatattgaaagaccttaaggaggcagaaaaattgtctgaatactggtctccatacaatcaagtccctcaggatgagagctacgaacgccccaatgatgacaagttttatgaatatccacgtagccgcatgaactattgggctatcaaagccacgcaggcaagagcttacatgtggatgggtgattacacaaatgcactggaagctgtaaaaagatttatcaacaaagataagccggccatcaagtggatggatcctgacgatgccataaatgttgaagccaaacaaaaagacctcacattcactacagaacatattttctatatcaatgtcaccaatttatacaactcgttacggccttacgtagaaagctatctgattcatggagaattcacacaatcagaaaacgatgattttctctacaaaagcgaacagaacttgaacgacacctatgaaatgggaagcggcaccggcatcggtacctcagactaccgttatgctgcctggtgggacaaaaacgacattgagaaaaaagtagaaaaattcagagaagtaactgacagcgaatccccttctaaaaataaagttcctcttatcagaaaaccggaaatgttctacattgctgccgaatgttacaacaatctcaaccaaacagccgaagccgtcaaactactgaacgaagtaagagtggctcgcgggattccgtatgcaaacaatcttccggaaggtttgagtaaagaagagtgtgcacaagaaatcgaaaaagagtggaaaaaagaatatatcagcgaagggcaactattctactattacaaacgcttaggcaaagaaatacaaggagcaagtatgggagcctcagataacatgtacaagttccctctaccggaaaaagagattgaaatcggaggacgccaataaacaagccaacaacaacattaatatataaataagatgaagagacaatatataatcatcagcttactcttggccttgataaacatcacatcatgccaagacgaggatacaaccatgttcgcttcgccggctggagtatattttgacaacgattctacattatacagttttgcagagaatttcaacaataaagaatggggtagcgataccatcaaattatttatcggtatctccggggatcccgttccttacgcacgtcccatatctgtaacgctacatgaagacagtttcaatacagccaaaacagagatgttcgacttcttacaaggagagattccggcagatagtctgaatggaatcatcccggtcaaactaaactataccggagcagaaatggataccgtacaatatcgcttcaaggtccgccttgtcccaaacgaacactttgctgaagcaaacctgtttagacacatacataaaatctatgtcactgccatgatgacccaacccatcaactggaacaagataaaaagatacttcggaaacaactactccaattcatggtattcattcattctgacacaatttgagatgagttatgtaccctattggacaggcaaaaacaatcctgacccggaaaagtataacatgccaagcaatacattccaagcatacgtaaacaaagtaagagtagcccttgatgaatacaaccagactcacgacactccattattacacgaagacggagaattcaagggattacctgtaaccatgtgataataacaaataaagaaatctatgaaaaaaataatcatcataattctggctttattcagcatgttctcatgctacgaagatcattcttcactgaacaccaagcttatcagtcctatcaacatagatttaggaatcaccgatccgaagtgggacccgagccgtcctatccaatacacacttttcacattggatactcttcgtataaaccctattgtctatagagaaggtattgaagattctcagttgaaatacacctggaccattgaaggcaatcttatcgaacctcagattttaggcacaaacatgactttagaggtccccatcacattgggggctcaaagcaatgcctataagcttatatttgatgtagaggatttgacaacaggtatacatgccgaacaactgtttgatatctttgtgcaaactccgttcggttccggtctgttggtatgcgacaccaaagacaatggcgcaagcagcgacgtgtcgttgattatgggatataattttacagacaatctaaaaaaagaacagaccaaaatatccaaggatttgttccaaaaaatgaatggaacaaaattcgaaggacaggtaaatctttgtcaaagcaaaaaatatggcaccaaccgcagggcgaccttcgcttgcgacaaccaaatataccgggtagatccattcgatttcaaaatacaagacaaaaatgaagagatgttcctctttgctcctgaaaaatttcaagtatcagcaatgggatactctgcacaaatcggtacagaatacattgtcattgatggcttggtttatcctaacacaatgcaacaaaacaataaaaaatatctgcactatcttgtaagcagcaacatgagcaaatatgcatgcagccattttgcttttccccaatatgccaatggacttgcatttgacaacatacaaggacgtatcatggaagtggatgaccgcattaaagtactaaactcaacagacttatgtgataaagattctccatttgaccccaatcaattaagcaattacgaatgtaaaagtcttatgccggacggaaatgaatttttcttaagtatcgtgcaagaaaagaacaatggcaacatgtatgccttggtcatgaagcagggtcaatatcctgaagaaaagcttaacggcaaacctctaagaaaaatcgatctttcagcctgcaccaatatcaaagatgcacaattctttgctcttacgcccaatgccgatgtattttggtatgcaaccaaagaccaaatttattcggtttattatacaacagacaatctgattgtcacaccggaatacaccgtcaacccgggagaccagattactgcaatgattatatgggacgactaccaaggcaaggttgattatacgaatcccacacccaatgcttcagacaaaataatttccacttacagcaaagacagaatgctggttattgcaacagaaaacaacggaatcggcaccatccgcaccattgccgttgcccaggtcttaagaggatctttagagcaagacaagaatgtacacggagaatattctgataattttgggaaaatcaccgctattgctttacacaaataatgatgtcaaaaaagataattatgaaaaatatattactagctttctcagttcttctttacttatgctcctcctgcaccaaagaagctgaatataaagttgcgaaaaaaccggtttacaatccggtaaaatacggctaccgtgcatgtgaaatcagcggtgaaaacgctcactggggaaagtttacattgaaaatcaattacgaaaatgaagtgacagactccattacccgcatcgatgccaacaacagaatcaagggaagaatgtcattgtcagctgcatctaaaacaaaccgtagctataaaatgtatgattatgtctacgctgttgatgcagattccattaaacgattggacgaaaaactggcaaacaaatatggagccggcaactattctctggaagattccattcctatcgccggcaaaagtatttttgaaagcaaaatcatcatagatgattacggaaaagatgcccagcaaacattggaatattacactcctttcgaagatccgggtgtaggcgctgattttaataacgagtatacccacgacagtaccatcatctcccgctttgaatttgacgagaatgccaaattagtggcagaacgcatttttaaagatgtttatcttgacaaagacggagaaaaagtacaaagaactcttttcaaaagagagtatgtatatctaaaagacaaactttcagccattatctactcgaaagcagaaagcggagaaaactttacggaaatcggtcgcgacaactatgtctattcagacaacaagctcactgaaatcaacggctatagcggcaacaagacattcgcttatgagggcaataaaatcatcatgaccgaaaatggagcaaagaccgaatatgaattgaatgaaaaaggattcttgattgctgtcaaatatccaaacggcagctatatgaacattaaatatgaagaaggcaatggcgacttcgaacacttaactccgatgtacgaacgccatcgcggtctgcctttcatcaaataagtagtaattttatgtctttttttaaaataggggctgcttaagtttgcaggccctatttttatttgcacatatccaccgtgtcacaatgagtatttatagtggagtctatataaccaataactctaatatcacgtacagatttcttaaaccatgctattcttttgaggattcaatagctttaaataaaatcccccaatcatcgcctttggggtttaaacaaatcttcttgcccaaagaatacattttcatcctctgtttctgctgaaataacaataccgacaaaagggttgttttcaaagattctgcttcctcatttattttactgcatatatcttattttgttatgatttccggatgtgccgacaaatattgatctcgcaatggcaggcttaacacaaaacgtttttccgtcaatatcttcaaaaagcctgagaccggtttcatttaattgcctcgaactacgtttctgcgaaaaagcgggaacaatatccttgtatttcatcattaaaagcgacttaatggctgccatatcaatctttacatcctgcatatccgctttcaaatcatctatatccttgccatgcgcaagcaaagcctgactgatagagaccagctcgtttttttaatcccttggcatcgcttttcagcatatcaatatctttttcgtgaggttcacaagatgcacgacacgtacgctattattccgatagctatccctatcaattcccaatgcagcttatccatattaattttgtttacactttaaacacgttttaaagatacaaaataaatccgatgttcatttcggaacgacagctttatttcaaaagttatatatcatataaacacaactcctatccgcaataactgcaccattgcctaaagtatcgcagccactttacgaatattgtctaaacgctgcataaatgacttgtcctttttggctacacgaacattgtatctcatttgaagacgcatcaacggttctgcctccacccctaacgctgcctcaaacatcaatgccgttttttccgtgacgggacgatgagcgtttaatatctcattcaatacagaataacctatgcccatttgttctgctaacttgcgttgggaaattcccctgtattcgatttcttctttcaatatttcccccggatgagtagggaatgccggctcaagattattcgctatcatattagaatcaacttcttgtattgttatcataattagttatttatagtgatttgacaaatccgttatattacatatcgtagcaatggtttccccatctctaatacgttcctcaaattctatacgatattgatcgttcactctcacggaagaaagtccggctttatcatttttcaacttttcataattcatgttttccaccatattctacaaagcattatcatcttatattcttagttctagttcattaacttgataacgtcttccggcagcattacattcccagcatcatctttcggagcattcttaagaaacagcactgaaatgattgtatagttcttagcaaacggtaacaaattggctttgcggagaagttcatttgtcagttgtttgccattctcttgggttgtccacttgcattcgccaaccagcagatactttttgtcaagcgattcggctataatatcgaactcgacctgttctggcttctcatcctcattgagaacagacccccaccagcgttttgctttgccataaactactccattgaccatatttcctgtaacagcatcccgacacaatttttcccattgcatactcacatacacagagaaatgagcagtcaaagcctgttctatgggtaagcgacgaccaagttcaataaacgaacggttagggacaacaaactgatagtagaaagccataaacggatcggctatcttgtagaggctctttttcgcatttttttcatcaataccgaacggaacatctttttccaagaatccaagatcgataagtttcttcaacggacgcgacagattggttgccggctcattgcatcgtgcagctatctcagaaagccggtttgccccagtaccgatataagacattattgtcgaagtcttgacaatatccttcacatcatcctgaaacagttttataggctcttcgtaaagagttccatttacagaaagaatattatgccacagggcatcatcaagcgaacttctgttttccctcaattcccaataacgcggcacaccgccccatacggcatactcttcaatggcattcatcgcattaagatgcaaagcctcttgaatatacggcaaacgtatcggtgcaagtctcactatctcatcagcacgcccatatagaggtgcagtagaatccaggaacaacccatacatcatattttgtgatgaaccacaaagcacaaagttatactttaattgcttctcatcaacaagtttctgtaatacagacggcaactctggagattgctccacgagatacggaaattcatccaaacatagagtaaaacgcttgtctgtccgataattgagcgcacgaaatatcgattcccaatccggatacgtcaatttgtcgaaatccggaaacacttgcgctatcacttttgcaagcaatattctctgatactgaccttcagaacggtcggcaagaaaataaacatcatgatccgacaacacccttttgataagcgttgacttacccaagcgtctgcgaccgtacagcacgactaacgaggacttctctcctgtaagagcatccttcaatcgtacagcttcatctattctatcaacaaatttcatatatcttatttattatgcatggcaaacataatgtttttatagcataatacaagattttaaaccatgtttttattccccccttgtcttctactaaactcctatatactctcaacttaaatatatgacaactataagacaaagataatagattattatatttatcttatagttatgttatctttgatatatagatgtcctatatttgatagggaggaaagagggagaaaagagagcgcaacaagagaaaattgactctgcccacaaaagatatttatatacatccttgtagattcgagaaattctcaatacttttaaaaattgaaatttaaaaaggacaatttatgtatatcgacacccattcgcacatttacgaagaggagtttcgggaggaccaagcagaagtcgtggcaagagctatacaaaccggcgtggaaaagattatcctgcccgatatcgacagcgaatcccgcaaccgcatgctccaattggttgataaatatcctacaatgatgttcccgttagtcggcttacatccaacctccatccatgaaaactacccggcagaacttgcttacgtagaacgagaagtaggtacccgcgactattacggcattggagaatgcggcattgacctatattgggacaagacctattaccgcgaacaaatcaaagcattcgaacaccaactcggaatcgcccgagacatgaactttccggttgtcatccattccagggattcgctacaggaaatttttgaaatactaaaaaaaaacacccatgtccgaggaatacttcactgtttcccaggcaatgccaacgaggcccgtcaagctattgatatgggctttttaatcggcataggaggtgttgtcacattcaagaaaagtattatggcagaaacagtccgcgaaataggaataaaacatcttgtattggaaacagacgctccttatttagccccgactccataccgaggcaaacgcaatgaaagtagctacattccctatatcgcagcaaagatttcagaaatcacaggtgaagaaataaaaaaaattgaagaaacaacaacgcaaaatgcaatgaatttatttaatttgcactccgaaaacgtatgaaaaagttgacaatatggctacaaaatctgtacttattatatataccggaggaactatcggaatggtgaatgacccagagacaggagctttgtgtccgttcaacttcgagcaaatagcaaaagcagttcctgaaatcaaggagtttgaatttgatattgacagctatactctgccggaaattatcgattcatccgatattcaacctaaggtttgggctgaactatgcaacatcatcttagaaaaatatgataaatactgtggttttgtcattctgcacggaaccgacaccatggcctattcggcttcggcactaagtttcatgttgggcaacttgaccaaacctattgtattcaccggctcgcagctccccatcggcaccatccgcactgatggacgagaaaatctcatagccgccctggaaattgcagcagcgacagaggagggaaaatctgttgttcctgaagtatgcattttatttggagccaaattatatcgaggcaatcgaactacgaaagcagatgccgaaagttttgatgcattccaatctttcaattatccaccattagccgaaataggaatccatatcgattacaattacagcgctattgattattctcccaagacagctccgatagaagcattcactgggatgaacaccaatgtcgctgttttaaaactattccctggaatccgaatagaagtcattgatgcaatcatcaacacacctggtctacgtggattgattttggaaacatatggagccgggaatgctcctacaacaaaacaatttcttaacaaaataaaagaagccggagagaaaggtattatagtatataatgtcacccaatgccaggggggagcggttgaaatggggcgctacgaaactagtagagaaatgataaactacggagtagtaagtggttacgataccaccatcgaagctgctgtctgtaagctaatgcacctattagaaaaatattcagaccctaatgaaataaaaaaatatttaaattcgccattaagaggagaaattacacagaaacgtattgggttttaacatttattttgtaccttgccgcgtcttttaaaggagacagatgaagacacaaaggtttgcaagaagagatagaaaatatagagagttaaattttaattatttataaactaaaaatcagttaaagagatcatgagaaaattatttgcactaatagcagtttttggaatgcttactattggagcatcgaaattaatggctcaggaagaatctgcagaagcagcacctgttgcaacagaacaaaccagcgtatcggaaaccactccgacaactccgaccagcattgatgacgaagagattgaaagcacttcaatgcatgcagctatcaagcagaaattcatcgaaggtggtgcaggatttatggcatgtgttgtattgtgtttgattttcggtttggcaattgccattgaaagagttatttatttaaacctttctgacacaaatacaaagaaattcttagctacatttgaagatactttgaacaatggaggtatcgaagctgcaaaagatctttgccgcaacactcgtggtcctatcgcaagtatcttctatcagggactttgccgctacgatcagggaattgacatggttgaaaaatcagttgtatcatacggatcagtacagatgggtcttatggaaaaaggtcttacttggatcggtttgtttatcgcattggccccgatgatgggattcttgggaactgtaatcggtatgattgaggccttcgaccagattcaggcagcaggagatatgagcccggcattggtagcaggaggtattaaagtggctttgattactaccgtaggtggtttgattgtagctatgattctgcaggtattctataactattgtacagcaaaagtagaaggcatcgtaaacaatatggaagatgcatctgtaagcatgttggacatcttggtaaaatacgagcaaaaaaacaaataaaccatgaataacaagaaaatacttaatattgtaacacttgtaatgttcttaataacattggtattgttaggtttgtttatcttcggaggcaaggtacctaaccaagcatacgatacccctgtttataccggagcattacttaattgggcttacatcctatgcggcatagcaatccttgctgcagtagtattcccaatagcacgtctatttacccgaccgaaacaagcaataaaaagcttcatcggattggcaggattggttgtaatagtattgattgcatatgcaatggcagatgacactcctttgaaattaattggatacaacggaccggacaatgtaccgtccagattgttaatgtcagataccatcatttatactatgtatttcttgtttgcaggagctgtattagctatcttgggaacagaaatctacaaaagagttaaataatttaccctgtagggataaaaccaaaggaatatggcaaagaaaacaccagaaattaatgccacttcaacagccgatatcgcgttcttgttgcttgttttcttcttggcaacaacaaccatgaacgttgactctggtctgttccgaagacttccgccctatcagcctgacgtggaacaaaatccaccgaagtatgctaaacgtaatattttgcaagtgctggtaaacaggaataaccaattggctatcaacggggagttggcagatgtttctacattaaaagatagaacgattgaatttattaccaatccggcaaacagagaggatttacctgcaaaggaaatcaaaaccattgagcttttcggaccggtagaagtttctaaaggaattgtatcgttgcaaagtgacaaaggtacttcttacgagatgtatattgcagtacaagatcagctaacagcagcgtacaacgagatgagaaacaataaggctaacgaaaagtggggtaaaaactttgacgaattgactcctgaacaacaggaagcagtaaaagatgttatacccatggctatctctgaagcagaaccaaaaagcataggagggaaaaaataatggcaaaatttaagaaagacggaaaaagagagacacctgcaatttcaacagcatctctacctgacatcgtattcatgttgctgttcttcttcatggtaagtacgaccatgcgtgaagtatcccttatggttgccaatgcaatgcctcaagcaaatgaaacagtcaaattggaaaagaaatccttggttagtaacatttatgtaggtaaaccgacagaccactatcagggagcctatggtacagaaccacgcatccaattgaatgataaatttgcgacaattgcagaattgcaagcatttgtagcttcagaacgtgatgctagaaaagaagaagatcgcaatagcattaccaacaacttgaaaattgaccgtaatgtaacaatgggtatcattacagatattaagcaagagttgcgtaaggcaaattctttgagagttaattatggtagtacaaaacgtcctacaagatagttagttcttaaatcaaaaatataagggagcttattcgctccctttatttttacaagacaatcattgcaaaagaagaatttttactatctttgcacagttcatggttccgtagttcaatggatagaatgaaggattccggttcctttgattggggttcgagtccccacggaatcacaaagcagtcttttcaagactgcttttttatttattttactatatttgccaaaagcaataatcatatgcaggaaatttcaaaaaacaccaaactaaaagttataggaggctacacgcttctgttcctactcacattactatcaaccgtactcatatataaacaaataaccaaactcatcataaacgaagaaaatcaaggagattcagacagaaaatttttcatcgtaagcaataccattacaaatctatatgaagcagaaacgttaagcaatgcattcatacaaaccggaatgagtaaatattttaggaagtatgttgaaatactcgacaaaacagaacaaaatatagatacactgagacaattgacaacacaattggagcaaattttcagattggatagcattaacaatttattagacagcaaagtccgtaacctacaagacctagtatatgtaaaaaggacatttgtaccagaagacttttacaataaagctatcgcaagtattgagtctggcaaggactcattgccaactcgacttgacatccgcccaagatacataacgacattggatacttcgtatatcgtgatagaaaaaaaaggcaggagacgaaataacgaactagattccatattaaacgtaacacgaaattaccacatcgtttacgatacactcaacaatccacaacccaatgccctacgcaataaagacaccgtcgtaaatatacttcgaaacacatggcaagatatccagaaaaagaatgaagacataaacaaacaaatcagcacaagggaatatgcattaatcaaacaaagtacaaacatatcagacaaaatgaagcgtattcttagtgaatatgaaaaagaagaaatacttcacgctacaagaaaacaggaaacccgcgaaaaaactgtaacaacaatgatacacatcttcgcaattgtcgctgtggtcgcatttctacttgtagttttcttcacatttttcatattacgggatctatctcgcagcaatcgctatcgcagagaattagaaactgcaaatcaatatgcggaccaactactcaaaagtcgcgaaaaaatgattttaacagtcacacacgacatcaaagcaccactcagctccatcttaggatatattgaactattaacaaatacgacgatcactgacagacaacgctattttcttaagaatatgcaaggatcgtcaaatcacattctaaaattagtaggcaatctattagacttatcaaaactagaaaacaataaaatgcaagtagaagaaataatcttcaatccacaacaactctttcaggaaatcatagacaattttcttcctcttgctgcaaacaaacaactcatacttcaaaataaattcggacaagacttaaatggagacttcaaaggcgacgctttacggataagacaaatcataacaaacatcctatcaaatgctataaaatatacccaaaatggatggatccgcttctctgccaatacaacaacagatgacaaaagaatcatccttaaaattgaagatacaggctcaggtatgactccagaggagcaagagctaatatttaaagaattcacaagactaaaatcgcactctgccatagaaggaacaggcttaggactaacaattacattaaaactgatagatctattacaaggggaaatgaaagtacaaagtgaacccggaaaaggaagttgctttaccatcattctaccatttcaaaaagtaaaaatatcacctaatacacaaaacaaaacaacatcccacaactctagtaatgaaataaacaatacacaagtagctgtgactgaaaatatgcagacgaaaccaaacgatataaatgtcctattggtcgatgatgatcctctgcaattggcaatgactgccagtctgttggctaattatggcattcattcctcgacaacaacaagcccacaggaagttataacacgcttaaaaaatcaaaaatacgatttaatgttctctgatatacaaatgccagaactgaacggctttgaattagtcaagctcatacgcgccttaccggaagataaatttaaaacactccctatcatagcactatctgcagattctgacaagcatgaatcagaatacatacaagctggatttacagcctatttacctaaaccgtttcaagcaaaacaaatcatacaactaatttcaaatctgattgataaaaaagagttagagcatcaaataaaagaggttccaatgtcccatctggagggggataaatacacattcaaaaatatccttcaattcacggataatgatacacaagctctgcaaacaattataaattcttttattgaaacaacaagagaccatattgccaaactgggcaaactacaaaaagagcagcagtgggatgaaatatcaaagttagcccataaaatgttacctctattccgtcaattggaagtgaaaaacacaactgaaaagctagaacaactcgaacacccggacaaagcaggcatcggtcctaatgaaattagctccctcacaatcactgtaatagaacaagcctctgccctaatcgaagatataaaaagaaatgagcaggcccataaataaaagcctgctcactcgaaaatatcaaataaagacttattcgattgaatataacttcattttattatagagagttttacggtcaattttcagcatccgtgctgcttcacttttattattatgacatttagcaagagcttcccgtattaaatccacctcattacgctcgcgtttcaaggcaagatcctcaaacattggttctaataagtgctctgacaattcagtagggatatgctccggagttataaaatcgtcttgacacaataatgtagctctttttacaacattacgcatctcacgcaaattacccggccaattgtagtgtctgaaaatatccattacagaatcatcaaaaccgacaacatcttttcccaactcttcattagaggctgctaaaaagtgattggcaaaaacaggaatatcttctttcctctcccgtaaactcaatgccttcaaagaaaattcattcaaacggtgatacaggtcttcacggaaatttccttctgcgacagctttcgacaaattttcattagttgcagaaataattcgtacatcaaaagctatttccttattactccccacaggttttactttgcgttcttctaaagcccgcaataattgaacctgtacatcataactcaaatttccaatttcatccaaaaaaattgtacctccagaagcttgcacaaaataaccagttttatcgttgacagctcccgtaaaagctcccttcacatgcccaaagaattcacttgcagccaaatctttaggaatagctccacaatccactgcaacaaaaggagcatctttcctagcactttgattatgaatcaaacgagcaatatactctttaccggaaccgctttctcctgtaattaaaacagtcatcattgttggagctaccaaccgaatatattcatagagtttatcagcatctctacttgtaccctttatgtatgcaatatcttttgtcttctttgtccgttttttttcaattggaatatccttatgttccaaagcatcttgtatcttctttaagatttcatccggaatgacaggttttgcgacataatcaaaagctcccaatttcattgcttgcactgcagtattaatatcagcataaccagtcataagaatcacttgagcctcaggtatagccttcttaacatgttgcaaaaccaccaaaccatcttcatcaggcaaacgcaaatctgtcaaaaccacatcatattttcctcctttaattttagaggaagcctcccgacaagaaaaagcttcttcaacctcaaagccacgctttgaaagccaagtcttcaacatcagacaaaaggtagtgtcatcatcgaccaataatatcttaacactcataaccatacaaactctacttgttatatgtggcgaaggtacgaaatcggaatgaaataaataacaaaatgaacaaaaaatcaattaattataaccataccctccccaaggaataattgcacaatcagaactcccacaataatgaaaacaagcaattccgcaaaggcattggataatacatagttgattcataataagtatccagcatattgtcaattctaacttgcggagtaagactcatcccattagaaaaagtataacgatagcctgctaaaagattttgaacagaataggggtctgcagaatactcttggtctgtggtaacaaaacgtctagcaatataagtaacctgccaagaagcaaaaatatcccgatattctgcagctacacgaatattccatttaaaacgaggaacatatggaatctgtttcatataagaaccatcatcaacatgctgctttttacgcgtacgcgattccgaccaattaaaattacccgatacattcgccgataaatcaccatatacataggttaattttccaaaagcctcaataccattagatactacatcccgcttattctgaggagtccatatccattgatttccatctttcggcaaccacaatatccagttatcgatatacatcaaataaccagcaagctctgcatccagcaacaggaagcgatttaatctcttgctataagaaattgctgcatcatatgaatacccatcctctggcttaacatccggatttccaccaggacgccaatacaaatcgttcatactcgggaaacgatagttataagcaacactacctttcaattgtaaagcacgatccaataaattgaaaaccaacccagcagaccaagtagaaacatttctacgatcattatgttcaaacatatactgaccatttagcatcatccattctacaggaatccaccgtgaagacacctgccatgaaagaacattcctgctatgttcaaaaggtgcagcaacagagggaatatcataaatcacaccatcatgaacatatttagatgaatcaatatcaatgtaactgctcacctctattaaatcatgcgaataagtcaaggtcgtattaaatagcaatgtcgcaaaaggtgcacaggaataatctaaaactccttgccacgtctttgaactattgcgactaccctccggatcaaataatctgccatcgtagcttttatcatattcctggcgataataaagccatgcacctttggcgtgcaaactatggatacccttcataaaatccaagccggcataaccacgaaaattaatttcccgctgtttttcatgcgacgtattcataacacctaaggcttgcggcaacaagtgctcgttttcctgataccaagctattccagttaatttggtaaaaggagataaacggaaatacccctcttgcattaccccaaattgagaataccgagcatccttacgtttttcacgaaaaggagtattggtcattactttattaacataagtataatcattatcagaatgctgataatacaaacgtgttttagaaacggcttgctgaccactaacattcgcctgtccaccaactgtataagtattatatgagccatattctcccagcactttaccacttacaccagcattccaatctgcatccgtaaaaagatttacactgccacctattgcaccagttccattttttacatgactgctaccatagtaaagattaatattatccgtaaaaaacaccggtatctgtgaaaaatcaaatgtcccggacatcggcggtgtgatattgattccattccaattcactcgcgtctgtgaggcactcgcaccacgaaacgaagccgttgaaagcgctccgacaccaatacttttgatatatattgtcgaattttcagacaataattcagccaatgaacgtgtacgatttgcctgcatgacagccgggtctatatgcgtaacacgtgcaccagcactggcttcattcgcatggcgtattcgctctctaatcacctgcacagtatcaagcacgccataaatagcaacggaatcgcgctgctgtgccttaatagttacccatggcactaattgcacgaaaaaaaagataaataatacacgcctcatttctgattatttcttttatctcgggaaatacacttggcttggataaactcctacccgataactttcaacagaattatcttccagatatttacggatatatccacgttgtgttgtataatccaagcaatcacagatatatacatctccggttggactaacagcaaaaccatacatcatactggcatccggcaaatcacgataatgctgaaactcaccagtatccacattcatacgccatacactttgtattccagccgatgttttctcagtaacatctaccggacaagttttagcattaaaataaatccatgtcccagtcgggtctatgtctgtacgattatggcttataactcctattacttctcctgcttgcggatgagtactccgaataggtagaacgtatttttttacaacccgctctgtatgggtatctatgcaagaaaaagaaattcctgtaattttcccagcctccatttcattcatacatacccatattttttgagatttatctactaacattttacaagtctttgtagattcatcatttcttacatcaggaataattctggctgattctttattaatattatttatatcaaatacaaataacccattagctgttatgccaaataatttattattttcgaccaccatatactctatccactgaggaacaggtatatactccaaaggctcagtaaaaggaggcattgtacgaatacgcaccaattgttgatttaaatctgaaactattgcctcgctttctgtgataggaacaatctgccgcggataaccagcctgagtataaaggatagtggccacagacttaaaagtgcctggttctataatttccaccttccgggaattatttaatgctacaaaataataaccgttaatcttggttatcgattgagcgacatcacccatcggacgtccattaacatcccgaaagatattgggaacaacaactccattacggtaaatcacggatatatcacccatattagtgtttattgttccttcattcaaaatcagtgcttctatatctccttcaccccatgaacctaccggataaccggttccggctttatcacaagcaatcaacaatatcccaatacccaacaccaccactttataccaccaactttttagtgccatattctaaaactttacaaatgactttgcttactgtttttacgcagctgcttgcactaaacgggatataggacgcttattcttcattccgacattgtcaaaaggcgaacaagtccacacatcccatgaataatcttccaattctcgattgactagaagaaaatttgaataaaaaaagttattctcaacagggataacattgcctttccccaaccaataagtagcatagctttttgacttaccccccaaccaataatcttctccttctgcagtgatatcatcagcatctacaggaatctgataaattccatctttaaaatagtcttgcgaaaaaagtatttcattatttcttgttcttacttggaattttccatctccatctgcatcataacctaatcccgcaagattatcgcctgtcaacacaacaaacagacggggatcatttttagctatagctttcaacatgtccataccggtctgctttgtccccacttcccaacgatacccccaagtaaggaaatgaacgtcattatcttcaggattcaacaaatcgtcaccggtcacccattgtatccctaaaacagaacgattggccccatttccggtccaattcttgattcgagacaacgtaaacaatgtatctgtcacctccacctttacagaatcagaaaccattccagccgaattaacggcagtcacttttattttaaaacttccatttttagaggcttcaaaccgatagacattacccctagattccggcccgtcatccacttgccaaaaaagataattcgcatttccatcctttacatgtgccttaaacaccaaatactctccgggagcacaagcaacagaactacttaaactttctattgacactgatggcaacggttcttcaatatcatcatctttttcatcattatcactgcaggaagaaaaaactcctgcaaatatccctaacaataaataaaggaaaaaatattttttcattgtatgctgttattcaaagttgtatgtaaaaaagattcctgccggtaaaacagtatgatttttataatccgcactgatcccaggctcactaccactaaaatcaaaaaatgtaatatgatttaaataaacatcattaccataacccttatttgtattcagcaccacttcacctgttaatggatggacagctaccgtattataagactgttttccattttccaacatatttgatgcatccaccatctgctcagtcttatttgctgaaaaaatatgacggtatatttttgtcccccccccattcaaatacaacgtatctccttttgcagtaatatttgacattgaagcccatgcaaaagaacaggcactcacaacttccccttccaatcgattactactttcaacctcacaactcattgcattcatctttgcaatttctccaacactcgttactacccaaatattcttatctgccgattttacaattccggtaactttcccatcaaattccgctttattagaaatttcatctttacctgattctatttttacaacactcttgtccacacaagcataaacattattatccaatacaatcattgtctttttagtggcccgttccgtacctctaatcaaagtgacatcacctgttaacggatgaaatagttgaattcctttattatccctcaaataaatatcatcctctcccaagactgctacatgagtaggcgttgacactttcccctccaattcagcctgaaaactcctctcctttttcaaggtctcagcattagtgattgtcaaatatccggcaccgccaccgttttgagaaacgatatacattttattgttcgtaataaacaaatcctgagaaacattacctaacatttctccattattttctttataatagacagaatctgttatcacacctttcggagaaataaaagacaaaaaacttggcttttctgcagaaccttcattcaatataaatgtcccatatttatacttaccatatacttccacagcaacatcagccgacacctctccacttgaacatgcaacacttacagttattttctggtctccaagttctttagctatataatcaaatttcaatccatgtgctactacttcatctttaatcgtccagatataatttgcatcaggacacagattagactctactgacaaacgcaaagtatcatcctgcataacagtaaaaccaccactttgactcacaactttcagctgaggaataaattcatcatcatcgtcactacaagaactcaatacacccgaaaacaataccaaaatcaaaaacaatacaccgtacttcttcataattcaatcaaaaacttataaaaaaccaaggaaagaaatcagcggaattgcccatatatagaaacctatacaagtatcccaacgtccgtcttccctttggacgttaaacattcaatcaaacaatggcaggttttctgacttattttccttgcccgccgccttcccattttctcaaaaaaaacagtggcaaaaagtaacgggaaaggtatatgaaacttacagcagtggatctgttcaggattttcacccgattcccttttaaaacaatgtaagcaatctaatgctcaatatcttcaccattgagtttgcaaatgtaatgatacattcgcaaacagcaaaataaatagacaaaacaaaaaaacttccgaagcataatgacctcggaagctgacagaaatgaatggtacttaaccacttaatttaatgcaaccacttgtactggtttcactatctcttgctttaaatattcgccatcagcactataaaatgcaaccattttagagtgtttattgcgcaaaacaattttataagaatcttcatgatctctatatactttactaacagcatatgccacataccttgatgcaacttctgaacgtatttcctgcggcaattcacttacacctatcggttcataagtttcgcaccccagaacaaaaggcaccacccctgccggttccaacgtatcctgttgattttttttcacctctaaacctttaaccttagattctgaagtagaaacaatattaactgcatatacagaaaaggtaattgctccaattactgctactatcaatgcgctttttcctatatttttcatgacatctattattttaaatatgctatcctgttttatgctttatcataggaaaaaatcatgccaaaacaatctttcatatatgacatatacttagtaaactgaatatcaagacaattatatctaaaatcacacaaatctaattatgtaaacattttctatagtgtagaaaataaatttgtcacctggggaaaaaatccacattttattgtagaatttcttatccataaccacctcataattattctctttgcactataaaaatctttttaatcaaaaatttaacaaataaatttcctcgaaaacgttttaatgtcttaaaaacttttatagatttgcattcgtaatcgttagcgaaacgatttaactataaaaatatttataaaaaagaaataaccaatactacttatactataccgcaaacttatgaaaactgctcctatcggagcagtttttttttaatatagcttgatttattgcaactttcccgttgctttcagataataagtttcactcaagcgcaattccgctcttgcatcaatagcatcgctccaggctttttgccactgagcttgcgcttccatataattagtaatggtttccattcctacttcgtaacggtttctgctcacttgtagattttcctctgcctgactcaaagatttttctgtcatttttacacgggcagcagcatcctcgacattaaaacgagttttagccacctccaattgcatcatctgtgacaactcctcttgttgtaatcgggccatttcttgctctgctttcaccgctttcactttgttgcgcccctcgccccagtggtatatcggtattttcaaagaagcaacagcagcaaaagaagcaaccccatccgactccccattcagagaaataccatcaccataagcataagaagcagatactcccaattgtggtaaaaaatccgcacgagtcaatgcaacctcttttgattttaattcaacttgcttctctaacagattatattcaggtcgggctgttatatcatttcccatatccagcaaattcaatgtagactctgcacataatgaatcatttacatcaacctggctatacaaatccactccaatcacacgacatagattcattcttgacaatgccacaccattattagccttacttaccaacaactcggcctcattctgtttcacttgggctttcagcaaatcattctgggaagccattccggtttcaatggcatctgtcacattttttaccagttcactcaccacttccagatatttttcagccgatttcaattgctctttcaccctcacatattgccaatatgcctcatcagattccgtaagaacctgcgctctgctagaatgcacattcaactctgccatttcctttccaatagatgccatcttaaaagcagatctcacttttccccccatataaacaggttgctccaacatcacccctacagaataaacattccgcaatcccaaagccaattcaatatccggcaagaaagcatattgcttaaacaatggcaaaccgtcagcccccatgacaggcttcccgtcaggccctaactgtatactgttcaatggtattgcctgccctacatcactagactgatatacgggcaaatatcctccatctatcttataattcatttttttatgcatataggcatacaaaccagagcctgaaattttaggcaaaaagttcgctctataagatttccaatcatatcccgcctttttctgctgttcggctgccacttgcatctttttactattctcaacagccatttctctacacttctgcagattcaatactatctcttgagcaaagcattcactctgcgaaacactcaataatacggctacaattatcaataatttcctcatgacagtcttttatttatcattatcagatctatgttttccacccttcctgctcggataaaacaatgcatacaaaacaggaataaataccaaagtaatcactgtcccgaccaacaatcctcccataatagtcacagccaacgaaccaaacaaatcatctgtcaacaatggcaacattcccaaaattgtagtcaaagaagccatcatcaccggacggaaacgcgaagaagacgaatcaagcaatgcagtcaactgatctttaccgttttccacttgcaaagaaatctcatccagcaaaaccacaccatttttaatcatcattcctatcaaacccaaagctccgacaatcgcaacaaacccgaaatcttttccactgacaagcattcctgcaacaataccgatagcagccaatggcagacaaaataaaatgatggcaggtttcttgaaatctttaaataaagatatcaaaataacaatcatcaatacgatagcccaaggcacattcttaaacaaataacgcattgcttcactacttgccttatgttctcccaaccattgcttagaatagccctccggcaatgttattgtatcaatcaaaggcatcagattcttgcgcacactctctgctgtataaccgggaacattgttgcaacgagccttaatcgccctctgcccgttataccgccatacaacaggatcctcccattccaatttaatcccccgtgttgcctgtgtcaccggagttgaccccactgccgacgaaagcaaatcctccttctttattgtccccaataatagacctttaattgtttctgcattcaatcctcccaaagaaggcaatacactccacaccggagtattatccaaacctcccaactgctctcctttattatccacactcttaatataaatcggcatagaagtcgttccctcataataagaaccgaccggcagcccgtcagtagccgccatcaaagacaatccgacatccgaacgcgtcaatccggccttcctggcaataggctgataataatccaccatcaaaacaggcatttccggttcccaattattagtcaccaaattagctgtcggctcatcctccataatctgttcagccttggcagacaactccttcaatactgccggatccggtcccataaacatcagttctaccggaaaatcctcatacatcaaattatatcgctttatccgcacataagcattcggataattatctgtcaaatactgttgcaaaccgggaatagctgccttcaaagcatccgcatctgtaaaatcaacaatcaactctccataagacatggcaggcaaagcaattgaacgcaccaaattataacgggaaggtgtacctccaaaactggaagtcacatgcgtaacatcctctcttgtcatcaaataatcttcaatgcttccgatatcttctttcaccgcctccaacgtaacaccttccggcaatttatactcaatgtagagctgtgtataacttaaatcagggaaaaaaccctgcggtatatatttaaaaccccatatactcagccccaacaataataccacaacgccgactgccaacttcttatggtaaagcatatacgataaaaaacctctaaaccattgatacaagcgaccattatagacatctccttctgtcacattcgtctctttcaccttcaaatagcgatctgcatgcatcggtatttgggtcaatgccaatacccaactgagcaatagagaaacagccaacacaataaacaaatcccggacatactcacccacggtatccggagacataaatatcgggaaaaaagccaatatcgctatcaacgttgctcccaacagcggcattgctgttttctttcctatattcgtcagagcttccggtttccgtactccccgctttaaatccaccaatataccatctacaatgacaatagcattatccaccaacatccccatagccacaatcaacgaagccaacgatactcgttgcaaagtgccatccaacaaatataacaccacaaacgagcccaatactataataaccaatccactaccgataatcacaccgctccggaatcccatcgtcaacatcaatacaagaatcacgaccaacacagactccaccaagttaatcataaacgtactgatcgcctcattcactcgttctggttggaaaaacaccttttcaaaatcaatgccgacaggaattcgtgatgacttcaattgcgccaattctgcatccactttctttcccaatgtaataatattaccaccggtttccatagaaatggatatacccaaggcacgcgaaccatcaaacctcatttcattacgggaaggatcttgatatcctctactgatacgggctacattccccaaacgcaactgatcgtcttcatgcccctgtataatcagattctcaatatcgctgattgattcataactatcatccacccccacccgcaaacgcttatttccagttttaaaatatccggaatatactgtcttattctgactattcagagtagccaatacctctgccggatgcactcccagattagccattttatcctgaatgatatcaatattgatacaaggtttcctatccccataaatatccacccttctcactccttcaatatcctgcaattcccgtttcaccaaattagcatactccaccatctcctcatccgacacaccatccgttgtcatggcataaaacataccatatacatcaccgaaatcatctttcaccaccggagcctgacatccgtcaggaaactgcaaagaagcattctctacacgtcttctcaaaatatcccacttttgctccaattctgttgggggaacagttgtttccaactctacagtgattatagacaaatcgttcatggattttgattccacactcgcaatatcccccattgcacggatttccttttccaacacatccgtcacctccaactcaaccttatgcgcagaggctcccggataaaccgtcaccaccaaagcttgtttcaccttgatttcaggatcttccaatttgctcattgagacaaatgaaaagatacctccaatcaccaacaccaatattaaaaattttatcagtgcccgattattcagtgcatattcagaaagattcataatacacagtctcctttccttttaaagcaatccacccacattggttttgctaacagatttcaacaactccacctgcataccctctttcagtttatgcactccggcgcttacgacaatctctcctttctccagacctgcatccaataccacactaccgtctttcaaaatttgacgaactttcacgtcacgactctttactcgtttttcagaaggcaaatacacccagacagaagcttttccatccttttccatcaaagcactcaaaggtatttcagtcatcgactgctcacccggatcataatcaatcgtaacattcacactcatccccgcagccagattatatccggtctccggtttcaagcgcaaacgcataccatacaattggttcagattagctttcttggtcacatctatcagctccaacggaaaggttttacccggatacacatccgcgacgcatgaaaaatcacggaaagaatgctggcgtacataatcactggaaggaatatcaatcaccacctcaaagtattgagtattaatcatagacaacactggcataccggcaccaaccgtttctccgacttcaaaatacttcttttggacataaccatcaaaaggagccaacaaacgagtatctttcaatgcattctgatgtgatgaatatttagcagaaatctgttgtaatccggaaacagccttatcgtaatcattcaccggaacacttttacgattgtacaattcaataaccctctccgcctcgcttttgatttgcttatactctgcctccgtagcacttaattgcaatgcataatcgcgcggatcaatttcagcgaccaaagcccccttcttgacaaaaccacccgcatcaacgggtattctaacaataggacctgccacccgaaaagacaaatccacatcttctgccgcacgaatacgtcccggataagttattttcaactccgaacgatacggcttcaccacttccgtctttaccatgaccacactctttttgtccgtttccgacgaacggcaagctgagaaacacacaattacacccagcactaccaaaaaatttcgaaataccatattgcactaaattattgaattctctatacaaattattaaaatctacaacaaatatgccaaaaatacatccacaccgtaattttttatacttttcggtatgttgatgttcaaaaaaatcaattgcacctattcctccgttttagaagccaaaagatacaattgctcatattgcaacctcacagatgacaatgcatacgaaacatcttgatgcataatcaaataattcaacactccagcccctatattcaataaattcttcgccaaaaccgaagtttcaatctccggcctcaactctccagccagctttgcatttaaaatcaactgttccaattttgacaaacgcagcatctttgattcagccaccacctgctttaattccggatacacggctatcacctccacaatcaatgaaagacacaaaatctcaggaatctcgctactgaattccctggctgtataattatctatatccatcagctttcgaatcgtcaaatcaacatattcctttaatgttgaaatacgtccgaattcctcggtacgtttggcatccagcaaggcataataagcacgcaatccttctttcaaaacctcttccttaccggaaaaatggtaataaaaagtaccacgagttatcttggcagctctctcaatatcactcaaacgtgcagccttaaacccctttttcaagaaaaggagaaaagccgtctctattatctgctgccttgtattggtcatttctttatcaataaataatattgctcaaactgcatccgcatatccgaaaatgcaatcctcatattttcagtactcaaatcaatattcaccatactggtagacaccgacatcaaatttcttgccaacacagatgtatccaattccgccttgatttcaccagtctgtttggctttcaaaatcataaactcccaacgtcccaacctcaaacgtgatagtttatcaatactatgacgaaataccggaaaaagattttcaacctccaaaattaattgaaaaaaagccacttctatgataaaaaacttgaacaactcctgccattgctcagcatttctctcctttctatccaccaggacaagaatgtactccctcaacgaacctattttcaaaaactcctcctcactcatctcgctgctcactgaaagatatttttcaatacccgcttttaaaatctcctccttattgcgaaaatagtaataaaaagccccctttgtcagccctgttgccgcttccaaatccttcaacgaacaggcaccataccccttgttcaaaaattgaaaaaaggacttatttactatttcatctcttaaatccgccatggtttatacttttcggtatgcaaaaatacataaaatacacaaacgaaaaaaattatacatacagtttccgccttgaatttgaggcaataaattacgacacatattgtattgaaaaaaacattttatcaaatttatataaaatcttggttttgtcattctgttttcatagatttgttgtaggcatcaattattctgttcatgaaactacaattcataatcatgaaaatattatttgtagttttatcagtaatgtacattactgccgcacaggctcaagggatttatatcccggggaaagtaacgaaaggtgattccgctgcatattactgcaaaaaagctatgagtattattcttgaagttggaaacacccggaatgtggacacaagttataccatgtactacaaagacggaagggagtttgatgatgagaactttgccgtcccccttaaacactcgcaggaaaacctactgtccgtattcaaggatttcctaacccaggaggaatgggaaaagctaaagggaaaaaattcgtttcttctattaatagaaattacggcaaacacttcagggaaagcggaagaaatcatttttaaattcagagagacagatccggtcatgatgcacatgcctcccgacaggctgtatgaactggaaaaacggttgaagaaggtattggaactgcaccctcgtgcatacttttcacaattcaagaagataaagtactttgactctatccgctataaaaacattgcaccatttgataaaaaaaactaatgacacataaaaaccatttatcatgaaacaactgctcatatctatcattttaattctgattaccttttctgccatcggaaatcaggattctacacaaacagaatggaaagaaaaatattttgaatattctataattagaaacaatattatagccgtacctttattctctattcctcctcataaacacccagatatgatctatgcaaacgtagagttttgtaataaagactattcgataagagactggaccgaatttacaattcaattcattgagcaagtattaaagaaacatttaactatcaaagaaatcaaacaattaaacaatgaagacattcaatgggcaaaagctagactccattttgaattcagtcattcaggtgaaatattatatacttggttttcgtggaaaaaagatgtgaaccacatattcatagatgagaaactgtatgcaatctatcaggatttcatgaaaatgaaaattgataccgaaggttttctatggtggcttaaaggtaaaaaaccaacaaccgaagaacagaagaaaatatatggttctatttctataccttttttctttcataaatggccataatcatgaaaatattatttgtaattttatcagtaatgtacattactgccgcacaggctcaggggatttattcgccgggaaaagtaacaaaagatagatgactccgcagcgtattaaaaccttaatgctatccactataaaaatatcgtgccgcttaaagaaaacataactaatatgaaagctaaattcttttctattgtactgattttaacaaacatctttgttattaatttattttcccaaagcacaaaaaacatgcaagaaattctgatgagcaaaaaatggtatcctgatatttatgataaagatgataaagaaacctcttttttcacatttacaaaaacacaacaaatagactctacaataactgaagaaggtgacttggagatatatactgctacatactatttgagcgatacattggatgaagtatttaagcctgaaaaagttggaaaagcaacaaaagggcaatatatgattctaaatacaagccatactccatccgttatatacacattcagatacaaactaatcgaagtatctgagggaaaaattgtcatacaacatctaactccagggatgtccatctatgggcatattaatacctgctatgcaattcctcctaaaagagaataaaattactccattacaaaaatgttgcctgatttgaaatatccgacttttcgggacagaatcaaaaccttataaaacatcgtatcgcttggtgaaaacaacaaataccgacaaaaataatacataaaaagctgcaccattttcatgctacagcttttatctaccaactttaaattatacttatttcattttgtacttttcaataatacccctgattttatcttcagttaaagctgttttttcatccgcaatcccactttctccatgtggatttccctgccaacgtacaattcctttaggatcaataataataacagaagggattccttccaataaaaatgcattaaacaactcataatcaggatcagtagactgataaaattctattggtacaaacttctcattcgattgtttttttgccttctttatatcttctatcccttcttttacctgctctacagtctgcgttgctacagcaataaatacagcatctttcttaaacttcttggaaaattcattcattttaggggtaaacttaacacaaggtccacaaaacgttgcccaaaaatccaaaacgataaacttatttgtcgtatctggaatctctgttatccactctccgaattttaataccggagcttttttattcaacaaaggactgctccaattaaatgtttcatcttcctgagcaacaagaaaaacaggcaataaacaaatatatattaaacaaactatctttttcataaccaacgattattcagttaaaaactttttcaacatactctctgtcaaattaaaaacatttttatccccctctccggatttcagcacatgcccctcccatactacaactccttccggatttatcagataagttgtaggccatccttcaataccaatcacattttcgattacatccacgctcacaaagccattataatactgtatatctggctcaaccatcaaactgacaatataaggctcatctgccgtcaaacctaccacacagagtgtatccttatattttcgtgccagctcattttgataagggactgtcctatgcatgacaggataagccattatacaccaaaaatcaaccaagacgaatttcccctttacatcgggcgcttttcccaaccattcctgtacttcaaatttggggaatttctttccaagtaacgaatgctgcaattgtctttcctgtcctttcacctgtaaacagaaacaacaacctattaataaagctaataatacacctatttttttcatttgcctttataatatttcttaattaattctttcaataaatcttctgttatcgcttcacctttcaacaacgcaaaacactcatgtacaacctttccttccggatcaagcacataacaataacacaaagtagttactccgtacttctccaccgttttaggtgtagaagcatatggatattcaagcattggctctatatccataataaaatcaggttcatcaggcgacaatcctatcacctgcaatttatccgcaaattcctttgcaaatttattgaatctgggaatatcgacataagcagccatcggctgggtaggagaccagaaatgtaacaacgtcaatctgccgtttctactctccggttttttattaatccacgtagcctcctctatttgcggagcttgcttacccagaagcctaggaggacgcattgcttcaatttcctcatcaacctcttgtcctgagaccattcctgcaaaaagcaagaacatcattaaaaataatactcgatttttcataaatataaattattccacatcccgtacacaacgtacagaaagcattttgtttttatcaataagaatacgtgccacctcatccgatttataacttatctgacgacaatacatcatctggctaccttcaaattccggagttgaagtccaataaaatccataaacataagggaaatatacctcaaatccatacatataatccatctctcccatacctccgttcctacaacgtaaagcactctcatcctgttgcaacaacgctccgacaggagcccctctccattccattttttttgtatccgttttagacattcccaatgatctctccaatttctgccaatctttatctgtcggcaaacgccatcccttgggcacagctttcaaagcagcagaatatgtatagacgcgaccaaatgtctgcaaattcttggcaatttctaattctttatctattggattacgattttcttcatgaatcacctcacatccatcagccaccttgacttttagattttctgtcatccattccaaatctccatatctgacataaggatattcattcccttcatcatctacaaacactcctttgtcatccggatagacaacaaacctttcctcatcgtctgaacaagatactccaaacaacaacaaacctattataataccaatacgaatattcataattactccgatttaaaacttaacctattttaaaacccaactcaacaatagcctgttttaacaattcaagcttacgaagaatgacatcatagtctgcatatttttgcttaaactctttctcttttctttccaatattgcttccaaatacttatccctgtcatccaaataagacacatcataaaacaccaaaaccgcatttccatcctcatcctcctcccaactagatgtaaaggacaaaatcccagtctggcgcaagaaatcttcttccgtgtcaaattctcctacaatttcattacgtccataatatgcattaccataagcataaaaatccttcaaaacattggttgtcaaaagcttaatcaacaacttcttcaaaaacttatcagcaaactcctgcggatctgccaacaatctgctcattgaaagtgcgatagcccttgatcctacataatcactttcttcgtgtaattcactccaacttcccacaagatcaccctcttcaatctgataagctgttgctttcaaagtttccaccaataaaaaggaataaggataatatgcagtatccatcgaagcaagtatattattttttacaatatcagcagctttttgcacccgttcttcctctgttgcataatcaaaaacaaatttccactgtcttgtacttgttattccgtaagtcaaatccaacaactctgttttataaaccggattcccatacatatcaactcccacatactcatgtttcaaagtatcgttcaacaacagataacatccggtttccgcatagaaatcctgacatatttgaacataagctccggaaaaacgattaggataaaacagattgacctctgaatctcttggtattatactatcctccttactacaagcccacacgcttatcaacagcatcaggcataaatatattttcattcttttcataaaccagcattttaaacattcaacggacagactctactgaaacaggaacacgttctttgcgcggattaggctccaattcctcaaactgcaaaacttcataaggaatttgcagagtccacgaagggtctcctgccatcaattcataagtactgacagaacttattttatctgcattgaacaacgcagaatacgtgttccgtatcgaaccggtaaacggcaccttctcacacactgtgtaccgtctcaaatcaaaccaccgttgcccctcaaaacacaactctctccgacgttcgtcacggatttccaaaacaagattctctccttttagattcgtctgtgtaaaattacctcttttgattcgatgctttctcagctcatccaacgctttcctggcattttcatcatctccttgattagccaaagcttctgccaaattcaaccatgcctctgctgtccggaataaacaacattctgacacttccgcatttacaccacttccctgtagagaatatttattacagtcccaagcaggaactccctttttttcataaacaataaaatatttactacgcaaatctccattcttgaaacacttctgcaaaccatcagaaacactcacacctgcaaaaagatttgtcactaaattaggtatgttatttccacccattgaaaaaatcacctcaggagaatctgctttagcaaacacatccgactctccaaaagtattcaaatcaacaagctcgtcctgtaaatcaagacacaattgggcatattctgcagccttttcccaattctgcatatatagatataccctgctttgcaacaaacgaacagcggcaatacctgctcggaaaatcgatttccgtgaaatacctgccaaattctcagcagctttctccaagtccgtcacaatctgcttatatacatcagccaacgtacctctcgggaaactgatatcttcaatataataacttgtcttaaccggtattcccaaggttgcagaagcactttccggcacatagggttggcaataaagattcgccaatataaaataatacgcagctctcaaaaaataagcctcaccgcgtattctcgccacattcagaatatctttatcccgttcaaccttctgtttgtctatctcatcaagaatcatattggcaatatttatatgcttatatattttattccaataagtatcctcctctgtcgctgtaagttggtcaaccgcataccccacacggtattgccaggttacataaccgaaatatttcttcgtcggctgcgcataatcaggctgactaacttcgtctgattccatattttccttagtctcatctgccatcaaatgaatatacgggaaataacacgcatctgtattcccaaatgccgtttccatataagtctcaccgatcagcaattcatccaaatcttcataacttcgaatataagcctggtcttgcgaatattctttcaagaaattagcacaagaagtccccagcatactcattaatataattgcaactatatatttcataatacacattgtttaaaatgatacactcagactaaacgaccaagtcggtctttctgataatttaacatctgcaaaaccactctgcaaaggagtctgattcttcaactttttagaactgatattaaaaacatttgtcgttgaaactgttgctgtcaacattgaaatgcccaattttgacaatttttccgtaggcacatcataactcaagcttacatttgaacattttaaataattacctgtcaccactctaaaatccgaattatcatacatactccaagcattattggcaataatctggatgccgttatcctgttcagacaaggaccaatgtattaaataagacaaactttccgggtcagaaccatttacaatattaggcacatcggtatgatattcatcaccggaacgttgccaacggttgataaattcataatttacgttcttttccggatcaaaattcaacccgtcattatataatgcaaataatcttacttttgagcctaaactataattcaacatcacaccaagccgaaaattcttatatcggaatgtattattaatacctccttgtgctgtcggttccctttctccagaaggaaccaataccgttgtataggtatcatatttacttttacctaccaactcttgcttacggtcgtgcatatcgttaaaaacaggtcctccattattgggattcaatccaatataacgatacgaccaaaaagtccccacagcatgtccctttgtcaaagcatttccactaagaaaatctgacaattcatattgatccgctcccggcaatgtttccatagaattatatactttcgaaaatgatgtagagaaggtccagcggaaattttcattcgaaatcggagaaatcgttgcatcaatactccacccctgattattaatcgtaccggaatttatcacatactctttttgaccgttcacactggaaattcgtttatttaaaaacgcatccttcgtatgtttataataataagagacattcaactgcacggcattattaaacaaagcaaaatccaatcctgaattaaacgaacttgtacgttcccagcgtaaattcggatttggataaacatttaccttagcttccaattcattgtaatgagaattaaacggcaacttctttataatcatctcaggagactgaccgctaagcatgttcccctgatacccgtaagacaaacgcaaagcaagattgcttatccatacattatccatctgcgcatgttctgaaatattatatgaacccgacaccgaccataccggtaacaatttctcattactacggctaccgaatttatttgaaccatcaattcgggtatttgcatttaaggtaaaaagattcctatagctatacgacactgaaaaataagcagaaatcatattcgtcaaattatctgatactacaggtaaattactttggacccatgatttataagcaggataatcatccaaaactaccgacgtaaactgacgaccacgttctgcataatatcctcgttccgtccgtgaatatcccttatatttgcttgaactcacctcataaccaatatttgctgcaatattatgttgcgcatcatctccgaaatacttattaatatcaatctgcaatcgtgctgtataagaattatttctagtataatcttttcccaattctccaccaaacggcatcatacttcctccttcctgacccttaggtgccaactgcccgaaatctgattttctaagacaagcggcataccatgtattttcaccattaaaactttcctgctctgtattggctaaagaatatgcaaaaataccttgtagatttatccaatcggcaatcatataacgcatgttcaccgtcatagaaatagcactgttatcctgcttctgataaccattctctacctcattcaagatattaaaatcatatagttgctgataaccatgcttctttttatagtaaaaataatctccatcttcatcgtatgcaggaattgcacgactggcagtataagcataatcaacaggattaattgtctgggcattatatttcctattaccaagattagcatttaatcttaaccccaactgaacctgtttccccaaactggcatccagattcaatgctgccgtatatctctcaaacttattatccgaaatcacgtcattatcaatcgcatatcctagagatgaataataacgtatatcctcattacctccggaaatactgacagtatgctgatgcgaaaaaacatcattcatcaacaaatcgaaccaatccgtattcatcgtttctattttctgtacttcccgtacaaactgctcgtgagaaattgttttattatacaattgatctaccaatccttcgtatcccaataagttcacatcctctgaataaacatgatgtttttcaaccaagtctcgggaaaaatccaccctttgctgtgaattcatcaaattaatatgtttactagtatatctaggacggcgacgaaatgttgcagaaaagtcataattaacttcaggacgtcctatcttcccttttttggttgtaattacaatcacgccattggcagcctttaccccataaagagctgttgctgaagcatcttttaaaacatcaatacgatctatatctttaggatttaaacctgcaatagcattaccgatacgattcacataatcagggtcattcaactcctccggagcaataggtacaggatcctgtacaataattccatccaccacccataatggctctcgattgccaatcaatgttgatgttcctctaattcgaattttaggagcgattccaacttcaccagagtttgtagaaagaatcatatcaggaatctgtccttgcagcatttggtctatagacattgtgccgggaatcataatatcctcagccttaacgctagttacagcactggtcaatttcttcttatcaatcacctgataacctgtaatcaccacttcctccatttcagtcgaaatcatctccataaccactttcaggttgttttgtcccttgtaaggaatctctttcgtctgcattcctatgaatgaaaagaccaatgtcacattaggtgatggcaactctatccgaaacttacccaccacatctgtcgtaactccataactgcttcctttgatcataacggtcactcccggcagcggtccattcttatccgtcacgacaccttctacaacgatcgctttcaccgtttgattatccattaccttcttgacctctttacgcaaaataatcaacttatcttcaaattcaaaatccaatcctgtgccggcaagataagtttttaataaatcctctactttttgattatcagcattaacatttaacgagattttcgacacatcttccgatttatacacaaatgtgtattctgtctgcatttcaatctcttctaaaaggttaataaggagtatatcgtttttatgtaaactgacagtctgttcctgtccgaaagaccgggcataaatacttgactgaccgattaataaaaacaacacaacaagcctatacaacctaatacgcccaaaatacctacagcattttttcatttcaattcattcatattagattaaacaattttatttcgatatcacaactttatttcctttcaaaacaaaacgcaaagaatttgttttttccaatttatccaacaccgtttgaatattttcataacgatccgtattcaaataatagcacacgtcctgcaactcagaactttcatattctacttccacatcgtaccatctcgccaactctagaaatatttcacgcagaggacggtttttcataataaatctaccgtttttccatcccaaagcttctaccgtattaatttgttgtgtcaacaacgagcagttttttttagtatatacagcctgaatattaggagtcaaaactaccgtatctccattttcataagactgtctgatacaacctgtcactaaagtagtcactatctccggctcattgtcataagattttagattaaagcttgttcccaataccgttattttagacccgaaggttacaacactaaaaggtgccgtagaatctttagccacttcaaaatatccttcccccattagttccacagcccgattggtcgcctcaaaacgctcagggtatttcaatgtagattctgcattcaaccacactttactaccatcactcagttgtaataaaaaattacatccacgaggcacggtaagcgtattataccggaccttccccccatcaacttcaccgctgtttttctcctttaatatcgtatataccaactttccttcttctttcaattcaatattcaagatagagtcagcactatacaattgtcttcccatttcatccaaagacaccgttttaccatctcccagcgtaagtgttacgcctgctggaatctccaacctgtcatccaccgtagaattatatctgaaaaacaacacacttcccaaagccaatactaccaacgctgcataacctaacaacaattttatataacgattccgtctatacaaccttttctgaatgctgccccatgcggcagcatcatccaactgtttccaaacaggcacattctgaagagtccaatacacctgcactttttcacgaaatgcttttttgttcgattcatctttcaatgattctttcaaaataattctttcatcatctgtcaaattatttgacaaataatccataatgagccgatcaaaatcttttttcaaattttccatatcagacagacaaacaaattataaaatgggtgggtagtttcaccataaatttttcaccaacaatttatttccctaaaaaaacaactgcttctctttaaaagtcgtacatttgagcctaaacaattcaatcatggaaccattaacagaccaattcatcatcagccttttgcaagaagaccttgaacaaggtggttccaaattatttgaacgttactataaacccttaatcatttttgcaaaatcttacacaaatgacattgagccggcagaagatttagtacaggatgtcttttaccaattcattaaaaataaaagttatcttacaataaaatccaacaatctgtcaacctatcttttcagagccgtaagaaacacctgcctcaatcaacttagtcaaaaccatatcataacttctgatatcgaacaaatcaaatatgatgctatagacgagatagcaccttcaatcgaaccggaactgattgaacagttgatgaatgccgtcaaccaactacctgaacggacacgccttgttgtcaatgccatcgtattacagaacaaacgttacaaggaagttgcccaagagcttgacatttccgtcaacacagtcaaatcgctactttcagccggcctccaccgcctgcgcaatcagttcccaaaagaatattgccaactgttgtttctgctgtttcgcaacaacagtcccttgggactataaatgcgacacctcccataaaaagatatgtcgcacctttcctacctatctcaatagtatgaaagagttattttacattcagactcatgcataccattcatacgtttaaaagaaaccccggttatcttttctccttccaaagcatagttcacgtcaaaaacattttcttcctctccttccacacaacggtgtttcactggcaaattctcggatgttttaccgcagcaattcaatatatgaggcataaataaagacaaattaccgtaaaatatcgaataattactataatacatccaagccacaagatcaaatccctctatattccgatacatagaatctgtaaaatcaaaattatcaaccacgacttgcaccaaatttcctccttcataaacataatcccccagccaatccaaattctgcaaatagtccccttcatacgtccaaaacattcctaattcttccaaagtccatccttcttccactccactgaccactttaccatcctccaaattataagtataagaaacacctcccaaaggatttactacaatcgtattcccttcataagcaacatttatttcatctatctgcatctctccggcttttgtcaaagcatattcttcataatcatctccaccatactcatccatcggataaatatgacgaatcgtaactatttttccatctgcataaacaaattcaaaagtttcattcagaccgttaacctcttctatggagatggcttttaccatacctgttacatcatcagcctccaacacaaccactttttccttcaacacggttgtttttcctccctgcacggctgacaactggtacacacccggctgaaaatcttcaggcaaaataaaatacataccggaagcatccggttctataacagcatccaacttcacatcatctaaatatagcttggcggtcgttttaaattccttccctttaaccaacaccttttgtccgacaagcacggtatcctgcatgtttatttccgctatcgtctgctcaatactatcttcatcttcaccattttcatcactttcattgtccgaacaagcattgaaagcgcatacactacataccatcaataacattagccaaatttttttcatagtctatatttttacatttaaattaattgttctaatagacagacaagaaaacttaaaaatgggcggccatatttcaatatttaacttttattaaaccattgtcattacatttatacgacaccgcccgatatataaaaacatcaaggctcttgcatttaacttctgagtaatgggtaggcatcccctacccatacaacataatataggcaagattaaacatgactgtaaatcaatattttatattagtattaaaaaatcattttttctcatttttgattgagaaactgtatcagttttgtaaagttcatagacaattctcttaaaattttagcaacacctttttgtttgtccgctactttttttcttctgtttttccatgccgcaataatgttcagtacaattctttgaatcgtgtcaagatttctagccgcctgctctgtttttcgttttattttatcttgcagtaaatttctgtcaagacaccaatgcaagctctcaatactccaatgctgctttgttattttattgaacagtttggcggagcctttcatatttgaaagatacagccgttgttctgaagcaaaggaaccatcggatttcttttctgtagatgtaagtatttctataatagtaaaatcctcgttccatttgttacgatctttgatgtgctcttttcctgagtatattttacatgttcttgtttcaatcctcccatgttccagaacaggtccttctttataagtatcaataggacttgccgtttttatactgtcttcaattccgtagcgtaatgatttttggtttgctttcagctcaatgacataatcacctcctttttgacggattttgtttgttatcgttttttgaaaatacattgcatcggcagtaatgatatttccggcaacctttattttatccaataatttaggggcagcagtgatttcattgcttttcttttggcaaatgtctgttgcaattgtaaatgctgtcttcgtggaaaaggctgatacaatatccggattccgtccgttttcgtatatcgtacctttcatggcttttccgtcgatgcagatgatgtcggctgtatcattggcagtgtccttgtaaaaggcagcggcaaacgcagatgccacattagccatatcttcatggtttattccttgggatacacgacataacgtcgattctgaaggtagtcctttaaagaaaatgccatgagattgaaagcgttttaaatgatgtttaccgaattgaataatgtcagctctggatgtgcatttgctcagacgtgcgattatttcaagcataaggatatcctccagtttgtacttgatgtttcctttgtttgttcttcgatattccggtactgtttttacaaattcttgcaagtgcgctaaaatgcttttgttgaataatttcaagtgtctcttttgttgtaaatagtagcacaaaaacttgtatatcaacaatataaatactatttttgctatagcaaaaataaaggtggtgacaatatcaatgttaaatcgatcttgaaaccacctacaaaaaaaatatttatgaagcaaaagaaacaccacaggcggtgcttctgcatcgtcatgcgcaaatataaagcatttcttgtcaaaacaagttaaatgtgcgggtttttaaatgcaagagccgtgtaaaaacataaagtatttgtacttttgccatacaatcagaaataaacaaacagacatattttatattatatgacaaaagagaaatggggcggacatctcgctattttaacaaccaaccttattttcggattcaacacccccattgccaaaaccatcgttcccgaatggattagtccgtatgggctgacttccatacgtatggtatttgcagcccttgttttttggggaatcaatcttttcacggtgcaagaacgcgtgacaaagaaagatttattcattctattctggggaggagtattcggacttatcggggctcaactctcctttgccaatgcgctacgtttcacctcgcccgtaaacatctccatcattgcagccatgacccctattgccgttatgctgctggctgctcttgtactcaaggaacctatcagctggaaaaaagccatcggtgtcaccctcggggcatcaggagccttattgattatactgtgctcctcacatggacagaccggtaaaggaagcctcatcggcaacttgttatgtgtagtaaatgtagtaacatacgctatctacctggtcatcacacgtcccatatcacaacgatacagccccgtcaccctcatgaaatggatgtttctttttgcagccatcattgcaatccccctcggtatacgcgaattgccggaagcccgtatgttctcgacagaggcaggatggcacatctggtggcgtctggcatacgttgtcatgatagccacaggcgtggcctatatactcgtccccatggcattaaaacgcatacgaccaactacagccagtatgtacaacaatgtccaacccattgtcgcatcggctattgccatttttatcgggcaggacattttcacctgggacaaaccgttagcagcccttatggtgttcagcggtgtttacctggtaacacaaagtaaggcaaaggacgatgaaagattaacggacaaacgataaagttttaacgagtattttcttaactttgccatagaaaccatataaaaattaatataacatggaaaaacaagcagcattggatttattggattttatctatgagagcccgacaagctttcatgccgtacaaaatatcaaacaacgcctgcaggctaacggattcaaacaactgttttccggcgaagcatggcacatcgagcacggcggaaaatattttgtaaccaaaaaccattcatccttatatgcctttattcccggaaacggcaatattgcagaagaaggatttaaattgatttgtgcacacagcgactctcctactttcaaaatcaaacccaacgcagaaatgttggtggaaggaaaatacctaaaactgaatacagaggtatacggaggtcccatcatgtacacgtggtttgaccgtccgttgtcattggctggacgcgttatgctgaaaagcgaccgaccactgaaaccaaccacacaatttgtaaatttcaaacgcccgttattggaaattccccatctggccatccatttcaatcgcgcagtcaatgaccagggcaatccgttaagcaaacaaaaggacatgctgccggtaatcggtatggtaaacgatgctctcgaaaaagacaacttcctcttaaaattgattgccaaagaaatgaatgttgcagaagatgaaattctcgactttgacctcactctctacgaatatgcaaaaggtacattagtaggtgtcaacgaagaattcatttcatccggccgattggacgaccttgccatggctcatgcaggaatgacagcactgcttgattcaacaccttgcaacaaaacaaaagtactggctatttttgacaacgaagaggtgggtagcggcaccaagcaaggagcagcagccccgaccttacgcaccatcttagagcgcatcgtattcggccagggaggcaaaccggaagatttataccgtgccatccacaattcattcatgatttcagcagacatggcacatgccgtgcatccaaactatgctgaaagacacgacccgaccaatcatcccatcatgaacggaggtcccgtcatcaaaatcaacgccaaccagaaatacgtcacagacggagattctgccgccgtattcaagactatctgcaaaatggccggtattccataccagaccttcgtcaaccattcagacatggcgggaggttccacccttggcaatatcctgctgacccaaatggaaatgcgtggagtagatataggcaacccgatgtgggcaatgcattccgtacgggaaaccgccggtgtaaaagaccaggaatacgttatcaaagcatttacgacattctacaacatctaatagaacaggagctgacggaaaggtcagctcctgattttatcaccatattcccatccgacaatcatgaaaatcattacctacaacgtcaacggtctacgaagtgcgctatccaaaggctttacagaatggctggaaaacgaacagccggacgtcgtgtgcatccaagaaacaaaagcccagccggaacaaattccaactttagaactagaagcattgggatacaaatcttattttttctcggctgagaaaaagggatatagcggagttggcatactgacacgcatcactccagaccacgtggaatacggcatgaacatgcccgtttacgaccgtgaaggccgttttatacgagccgactacggagatttatctatagccagcatctatcatccttccggcacaacaggagatgaacgacaggcttttaaaatgacttggctggaagatttcagacgctatgccatggaattagcacaaaaacataaaaaactgattctatgcggcgattacaacatctgccatacgcccattgatattcacgacccgatacgcaatgccaccagtagcggctttctccctgaggaacgggattggatgactcttttccttcaatccggctttacagacagtttcagatacctccatccgaaagaacgggaccaatacacctggtggagcttcagagccaatgccagaaccaacaacaaaggctggcgcatcgactattgtatgattacacctgaagtcattcctttgcttcaagaagctttcatcttaccggaagtcaagcactccgaccattgtccgacaggaataatcatcagataataaaaaaaggaagccttttaaaagcttcctttctgtgggtcctgagggattcgaacccccgaccctctgggtgtaaaccagatgctctgaaccaactgagctaagaacccttgctatcttgtcgattgcggatgcaaaggtagcgcttttttctttccctccaaacaattctctgttttttttgaaaaaaaaattattccacgactctgtttatttcgacaaataagcagcaaaaacctcatcaaacaactctccacgagtcagtttgccattctgaacacaaatagattccactcgcccccttacgcaaagtttattatcggacaaacggtagatatcttcaaaaaaaaccaattttgccccttcacgagctatatccaaacgcacaacaaaccgatctccgcttgtcaatgacactttataatcaatttccacacgtgccaccatagcatctatcccctgtttatgcaactctccgaaatttgcacccaccttttccaaaaattcgtgccgggcatgctccagatagtgctgataattcgcattattcacaacacattgcaaatcacactcataatcccgcactttcaattccaattcaaaaatataatttttcatgactctcctctttaagttcgaacacaaagatatagtttttcaattattcataaccgattcatcacaattaacgttcttagaataagctccattcaattttatttatatcattataaaatattacaataagaaaatttgtagttataaaaataattgatatatttttgttgtgacaaaagatgagtaataacaaataaaaaaataaatgattatgcaaccaattatcaattcattgattccagaattcaaagttgaagcttacaaagacggacagttcattactgtaacagaccaggatgtaaaaggcaaatgggccatcttcttcttctacccggcagatttcaccttcgtttgtcctaccgaactggtagatatggcagacaattacgagaaattccaggaactgggagttgaggtatattccgtaagtacagactcacactttgtacacaaagcatggcacgatgcttctgcaaccatccgtaccatcaaatatccgatgcttgcagacccgaccggagctttaagccgcgctttcggtgtgatgattgaagaagtcggcatggcttaccgtggaacattcctcgtaaatccggaaggacaaatcaaagtggcagaaattcacgacaacaatatcggacgtaatgccgacgaactgctgagaaaagtagaagcagcacaatttgtagcaacacattccgaagaagtttgccctgccagatggaagaaaggcgaagccactttgaagccaagcattgatctggtaggtaaaatctaaccagccgctcctgcacaaagttaaaacaaccccttgctagttcttgttgaattccatatctttgacgctcattctacacgattacgcacaacaatgttaaaggatagaaagcttctggaaggaatcaacaagaaaaagacaagcgcctggcgcgctctataccgctatctttacggaagtttgtgtaattatgccgcagagatttgtaaagatatagaggcagctgatgacattgtgcaggagtgcctgatttcagtttggcgctccgaccttatatttaccagtaccagaggacttttgacctacctatataaagccgtatatcacaactcattaaaatatatacgcgaccgtcattccgaccaaggaaaattagaagaatacagacaagatctaccctcagaagaagacgccatttatcaagcagttgaagaagaacttatcaatcaattacgcacagctatcgaccaactcccggaacagcgaaaaagaattctgctgcttagcatggaaggaaaaacggttgccgatatcgccgagctgctacaaatcagcgaaaatacagtaaagacgcaaaagaaacgggcatacgcctacatcaagcaagcactaggagttcaatatgccctattcttgctattattttaatgccactccggaccaatttcccttatctcttactcccgaacacatccatatccaatccatgtcaaatctataatgaatcctatataaatgctatatgaatgctatatcaatcctatatatataggtttcgcataggattttaatagcctatctacaggcatatacatagatttgccttagagtttccatgacttgctttagagttctctcaacggaatccaaaagaagaataatttttttccacgattctgtcacccgcaaagcaaagtgtcggactatatttgatgtgttaccaaaaaactttacacattacttaaatttatgataacagattggacctcatttatacccaaaatggagcaattactccgacgtctcaccgggaaaaaacattttcccgacaacgatgaacgcttggaaatgctatttcagaaaatgcaatcagagcattatctggaacaaaaaattcaagctcaacaaagatttgactatcgacaagcagaagccgctttcttgaaattagccaaaccacacaagcaaagacttctcatctggcggtgggctgccatattattattgcccttaagtatggctgcgggattctttttcttgcataacaacgaaaaccggagcaataaagctcagacaacacagatggctctcagtgacaaacatgtgtacttactgacttcctctcaaaaaacatatgacctgacaacggggaccttaccatccggtttggactcacatatcaaagtcggagacaaaactcttaattaccaagagacagcaaataacacagactctctcatcaaaaaaaaggcagaaatacacacattagtaattcctcggggcggagaatactctatcaccttacccgacaaaactcatatctggttaaatgccgattcacgcataagctatccggtttatttctccggaaatacacgggaagtgaccatctgcggtgaagcctatttcaaagttgccaaacaagagggcaagccttttatcgtacatacagaaagaggctccatcaccgtttggggaacagaattcaatgtcaaagcttacgcaaacgaagaagatttcacaacgacgttagtaacaggcagtgtttcatgtaccctacccagcggagaggaaatatcactgcaacctcaggagcaacttgtttacaaaccgggcaaaacaccggttgtacaaaaaatagatcctcttctggcctgcggatggaaagacggactgtttgtattcaaaaacaaacgactggaggaaatcacccaacagatagtccgatggtttgacatacaagtctgctatctggatgaagaagccaaaaatcttcatttttctggagatttaaatcgttttcaagatataaactctttcatcaatctatttaaagaatgtgatgaaataaacattcgatttgaaaacaatataatttatatacaatcaatttaattaatcattaatcttaatcaaagagcatgaaaagaatgtttttgatgaagttctggctgattataaccttgtttggactgcaaccggtacaagcccaagcagggcggatcgtaatggatttgtcgcacaagacattttccgaagcagtcgaaatcttcaaacaacaaaccggaacgaaattcctgtacaatcaggagaaaatccaatcccagaaaagcgggacactacaaatcaatgcaaacaacacagaagaggctatcgcccagttgttgaaagcattcaaatgcacgtacaaattggttgacggagttgtcgttgttaaaaacgctccccaaacagacaatttagtgaagcgcaaaatcaccggtaaagtaacagacaaaagtggaaatcctctgcctggagtaagtatcatccgtaaaggtaccaccattggtattactaccaatgttgacggtaatttcactttagtactgacaggagaaggtcccatccccttggtgttctctttcatcggtatggaaacaaaagaggtggtctgcaaagatgacaaacccatcaaggttgttatggaagaaaccgcattggctctggatgaagtggttgtcgacggcggttatcagcaattgccccgtaaagacatggttggttcgttcacgacagtcaaagccgatgatatccgtcagagtgcctacaccagcatcgaccagatgctgcagggacgtgttgccggtttggttgcagtcaacacctcttcgcgcgtaggacgtgcccccaagctgattatccgtggtgtatccacactattgggaaataccgatccgctatgggtagtggatggtatcattcagccggacccgctgccatttaatgcaaccgacgcattgacatccgatttgtctcagatggttgccagccaagtatcctggttgaaccctgccgacattgaaagtgtcactgtattgaaagatgcatccgccacagccgtttacggttcgaaagcctctaatggtgtaatcgttgttaccaccaagaaaggacaggcagaccgtttgagcgtaaactacagcctcagcatgggtgtccgcttccgcccgaactatgaccagttcgactttatgaactcacaggaacgcatccgcttcagcaaggaagcatacgatgcaggagcccgctatcaaaacgaaccctatcctcaaacctgcacctacgaaggtttgatgttcttattaaacaacaacaccatcaatgaggaatactacaacaaacaggtcagctggctggaaacggtcaatacagactggttcaaactattgacccgcaactcattcaaccacaatcacaatttgagtatctcaggcggtagcaaaaaaagcacttataccgcctccttctcctacaacaacagcaaaggtgttgaaaccgggaacgacaccgaccaattcaatgtacgtttgggcttcaactcggaattgacagaacgcctcagactgaacatgagcatgaacggcacaatcggtaattcttatgggttcggagcagaagtaaacccaatggattatgccacctcaacatcccgcgcactacccgcttatgatcaaaacggcaacctgttatattacttgtctttatacaattatcgctacaataaagatcagattcctctgggatacaacatattgaacgaacgggataacagctatgccaaaatgaaagacaaccgtttcgatgcatcgttgaatatcaactacaaaattctgccatggatgagttaccaattagtcggaggtatttcctcatcctcttccgattcccgttcttatgcaggagaacgcacaacctatgtagcacggaattatagaggttacgactacggaagcgaagaagttaatagtgaaaaattcaaagctgccgtattgccatatggcggtgaactttacacttcggattccaaaagcatcagctacaatatgcagcacaaactggtcttctctcacaactttaaagagggtcaccgtctgaatgccatgctagcagcagaaatccgttcaacgacctaccgcagaggtaccaataccgtgtggggatttgttcctgagcgtggagaaaaaatcatgcaaccgacacctccgggaaaattggaacctatcgggatgacaatcccgacggatgattggggattactggaagccatttacaacggcaaatggacttctaccgagagaaccgataactatttctcattcttcgccaccttggcttactcattcaaagacaaatatgtattgaatgccaacgtacgtaacgatgtatccaaccgcttcggtcaggacgtaaacaaacgcttcgacccgacatattcattcggtctgtcctggcgtttgggtgaagaggcattcatcaaggacaatatcagttggctggatcaattgaacataagaggaactttcggtatccagggaaacgtagtcaacagcatcagcccggaattaattttgtcacaaggaggcgtacttccaaactacaatgaatattacaccaccatcaacagtcttccaaatcctctattgaaatgggaacgcaccaagacatggaacttgggtctagaccttcagttattcagaggtatctccatgaccttggaatattacggacgccgttccaatgccattatcgaccaagatgcccaacaagaatatggtgtgtataccatgaaactgaacggtggactaatcaaaaaccacggtgtggaatattctgtgaacttcactccttacaaacgagataattttgtctggaacatcggaattaacgtttcaaaaaactggaacaaagcagcttcccatgatcagtcaactggtcaaaataaaataaacaaaagcgactttttaagcggaaccactaatcgcttagtaaaaaaaggatatcctatcggcagcatttggtcatactcttttgccggactggaacacgagaccggttatccgatattcaacagactcgaatatgacgaaataaatgaagaaatagacccgtccaccttccttgtatattcaggtccacaggatccgttctttaccggaggtttcaataccagcatccgctggcactcactctcattgtctgccaacttctcggcattactcggaggtaagaagcgtttggtaaatccatacgaatctttcacctacggacagattcccaatccgaacgtaaacttctcccgtatgttgaacgatcgttggaaaaaaccgggagatgaaacacacactatcattccagccttatggaccgatgttgtaaaagacattaatgtaaccttgccggatggtagcacagaatccatttacgatatgtggggaatgtcggacgctatggttgtaaatgcatctttcttacgttgtaaccaaatttcgctgagctggagcatgaatccgaaactttgtaaaaaattcggggcaaaaaatttctctgtcaatgcctctgtcagcaatgtatttgtcattgccagcaagaaattcaacggcttcgacccggaattggcagacaacagcgtgatgccccgtatgttctcatttggatttaatgtcggattttaaagcaaacaaccatgaaaaataaattactgatactttttattactgcactttgtacagcctgcggagatttcctggagcccaaatccaaaagcgaatttgtgcctaaagacatcacatccctcaacgagcttctattgggagaagcttatccaacaacaagcacttctacgatgaatctatttttaggtctgctggatgatgatataaacactacccaatattacgaattaagccaaggtacgacctatgatccctattatgccgtattcacttggcaaccggatatgtatgaaacatttgaagacgaaggatacaatgacagagctataaatctgtatctaccttactatgaaaaaattcgcgggaccaatgccgtattggactatatgagttcagttaccggaagcaaagaagatatgataaatgtggaagcacaggctcttgccttacgttcgttcttctattttcagttagtcaacattttcggacaaccttattgtgactacaaaaacggattgggagttccactgaaactgacaagtgaagtggttgaaactctgcccaaccgagcaaccgtcagcgaagtgtacgaacaaatcatttctgatttattgaaagcggaagctctctatgaagccttgcccaaagaattgcaatggaaagcgaactaccgtaccagcctgcctatggtgcaactaatgctttcacgttgctatctttacaccgagcaatggggaaatgcggcaaagtatgcaaagaaagtaatagacaacacccaattttccttgtttgacttgaataatatgacagatgaatatgccgcataccatcaatatgacaattccgaaaccatttggccgtatggtaacataaaagactatacagattggataaatctgaaaagcgatggtactcaaggacaagaaacacactgcatttttaaagcttccgacaatttacttgaatgctacgaaaaaaacgatttgcgaaaaaacaaatattttgttccggaaagatatgcaacaggagaggtatatgtcatacaggcatttgccaaaatgggagcaggagaagaaagcaaagagccactacaaggattcagatttgctcgcagcattagactatccgaggcatatttgaactatgcagaagcaaaagccatgttattcaaagaaggtgatgctgcagcccgtacagaagcagaaaaagctttgacagacctgcgaaccaaacgtatgccgacagaatatgcaaccgttgaaatcaacaatgcagacaaactgattacttttacccgcgaagaacgccgcagagaactttgctttgaaaatcaccgttggtttgacctgagacgctatggaatgccggaaatcaaacatacctggcatgcaagcgcaacagatacaaaaacctatacattaaaagcaaaagaccctgcctataccctgccattgcctccgactacattagagcagcataccggaatgcaacaaaacccattagcacctaaaagaaccaattaatattaatgaccatgagaaaaataaaccttattttggctataatcggaatggcattactcaattattcctgcaacgatgaagataaactgaccccgtccggtcagtttatcccgacaggattgccattcccacaaggcgacaacccttgggacaaagacatcgttgaactccatgaaacatacggagtctacgtattttataaagatgtaacagaagcattgctgaatcgtgactggacttctgtaggaaccggagacatctataccggaggagacttgagcgatgacaaagtacaattctatgttgactttatcaaaaatgatgttttcaaatatgtaaacaaagaatgggtaacaaaaactttgccggtacgcctttacctgttagacaacttcagaaccagacctagaattgaggttgatgatgacactgacactggaacgggaggcacagacactgacaccggaacaggaggcacagatactgacacaggaacaggaggtacagacactgacaccggaacgggaggtacagatactgacaccggaacgggaggtacagatactgacaccggaacgggaggtacagatactgacaccggaacgggaggtacagacactgacaccggaacaggaggcacagacactacagatccccgctttatccctttttatgcagacggatttgactattgggctctgagttttacagacgatgaaattcaaaacttaactcacgaagccagacgattgagaagagtaccgtttatttatcagatgctcaaaaaggcagtaatgaaaggaattattacagatacagatgcaatacgagaaggcttggatacaaaaaaacgatttaaaaattcagatccggacagcccggattactatttgaatcgtggttatcctgataatttgtattcaaattttaaaaaaagttctgtaccttggcatccatctgaattttatggaacagatgccccggattatccacatgaagatttcttaaatctgattcgcaacaacatgtggtattcagaagctgaaatagaatctaaatatccactagaaaaatatccattgctacgtaaacgtctggatattgtatataagcatttattagacaattatggtattgacctgaaagccatcggtgccggttcggaagctaattgattatttatgaaacaccttatctgtttatttatactggttatgctatccttcttcggaaggatggctttaccggtttatagccaacaatccaatgtctggcaaggacgttcattttctacagcacacgaattgatagaagtttaccgacaaaaaacagctgaatccgtaactcacgactgctatatggtggtaaagagcggcgaatatattttaaattcagcaggcaaggcgaatgatatccaacaactattaaaacatcttccggccctgcaattggacgctccacaagtcgttgaatttgtacagaaaaacgatggagaagtattagcagatgcctattttatgttgtgtgccctgaaaacaggagcttcgtttgacgaagcaagagacggcatttcaatcacaacacaatttcccgagcgaccattaaaccaatacgattacgacaaactgaagcagatattctcttgctcaaatgcgcctttacaagccatttatctggagaaaatgaagttcatgttcggtcatcatggttgtactccggaaatggcagcattggagcgtatcatacgcaagaaatgcgcaacttcagaagtaaaacaggaaatactttctctctaccagcagtacgaacgagtttacaaaggagcctatgcccccttatccactctttataaattggatggaggaacagttacactagccgcttataaaggcaaaatgattgtcattgacgtttgggcaacgtggtgttgcagttgtctggaaaagatgcccaaattcattcaattacagaaaaaatacgaacaacataaagatattattttcttatctctttccatcgatcatgaaaaaaagaccgatttatgggaaaaaacaatcgagaaaaataatatgcaaaacttgacaaacgtaatagctccggaaagcaaatcctctttctgcagagattactttgtatcaggagttccccgctacatggttatcgactccaaaggcaaaatcatcaatgcatttgcctcactcgataagattgaacaaattattcaaaacacattaaagtaaaacattatgaacaaaatcattctattggtattcgctctatttgctatcagccgcgtctctgcgcaagacaatacgaccggaacccaatggttagccctcagtttcgaacaagccttgcaggaagccgcaaaacaagggaaaccagtttttgtagattgctataccaaaacatgcggaccatgcatgatttacaaaaaagagatttttcccatcaaggaaatcggcgaatacatgaatgctaccttcatttgcatcatgaaagacatggaagaaggagatggattggaaattgcaaaaaagtataatgttcgaatgtatcctacatttttggttgtagacgcacagggaaaagaattatacagagttcccatgctatttgaaccggaaaaagaactcgtgcccatgttgcaattaagccaacaaatggtcgagactcgaaagaaatacgacaatggagagcgtaatccggaattcctgaaagattttttcagcaacttgaagaaattgaaccccatggaatatgaaaaggtattaagcaactatctcgtaacggaaaaacaaaatgaacttctggaaaaagagtattgggatgtcataaaaaacgaaatacataatattgaacttccagcatttcgctatgcattgaaaaatcgcaaacaatacatcaaaaaatatggagataaagaagtatacgacaaacttttcggagaatataccaatgaattccgcatggcccgcatgatgggactcaactatgatatccgcattgcagacgcaaaaatttttgtcaaggacggaatcaaagaggctactccccttttatggcgcatggaaatatacgacctttggaattctgccaagggccaaaaaggagatatcatgacctatctgaaacgcttaaataaagccttgtatagatttgatatagcaactcaaatggatatagcaaatgactttggtattctttgtgaagtggcaaacaaagctgaaaaagaaaaaatgtccagcatgttggaaaaactaaaatcgtccgttaaagatcccagcaaaattaagcgtctggaagatttacagaattatttcaaacgctaatacatagcttatcttatcatttatgaggttattcttttcaacaaagggtaacctcatattttttttaaatatcagaaggttagttgttggaaaaagtataactttgcgactttaactgatataaaaatttcttataaataaaaatactatgggaagagcgtttgaatatcgtaaagcacgtaaattgaagagatggggcaatatggcccgcacatttaccagaatcggaaaagaaatcgatattgccgtaaaagccggcggccctgatccagccaacaatacacgcttgcgtattttgattcaaaatgcaaaagcagaaaatatgccgaaggagaatgtggaacgtgccattaaacgcgctgtttctaaggatacctccgattacaaagaagttgtatacgaaggatatgcaccttatggtattgctattgtggtagaagcagcaaccgacaataatacccgtacagttgccaatgtacgccatgcattcactaaatttggcggttctttgggtactacaggttcattagacttcatgttcgacagaaaatgtgttttcaaaatcaacaaaccggaaaacttcgatattgaagaattcgaattggaaatgattgactacggcattgatgaaatatttgaagatgaagatggtgttatcaacctttatggagcatttgatgcctacggaaatgtacagaaatatttggaagaaaacaaatatgacattgtcagcggtgaatttacccgtattcctaccgatacgaaagaattaacaccggaacaacgagctgaagttgataaaatccttgataaattggatgaagacgaagatgtaaccaatgtttatcacaacatcaaggaagaataatcgcgaaattgcttgcaagataaaaaataatgttgcatatttgcacccgcaaacagcaataggcagtatgcaacatttgacttcgtagctcagctggtagagcaattgactcttaatcaatgggccgagggttcgagcccctccgaggtcaccccaaaaaccacttacactctgtaagtggttttttatttaatctttcacacaccattccgtttccatccacacacaatcgagtagtaggaaaaagaaagtttttttcctactttcattttccgacctctcacaccaccgtacatgcggttccgcatacggcggttcttctaactgcgatgcaattgtgtataaaggtttaatattgacggataacctgccattattaagcgattgttcgttatagagcaagttaatatccaactattagcaatgtgccaatgaccttgcgggtattcgcccattgccaagccttcctttgggaaattccacatttttgcaggttgataaagcgagtacgattccgcttccagcttttccatatatacatacgaagtctgcgattataccactcgttcgttgatttgataaaggatttcatatctgcataacgataataacccatccaacctcggatgtattgggataggtggagtttcaaccaaacatagcctttaccattgctacggcttgtcagggatttaatggttctttcgaacttaatctgacttcttttgtggagacttagtccgcatttacggtctgctcttcagtagaatgagtagcctaagaacttcttccccacgattgaacccacttctgtcttctccttgttcactttcaagaacagtctcttttcgatgaaagttgagatacttgtaataagcaaattttaaatcgacaattttcggaaaagtaaaatcgacacaaataagtcgagacaaaatgttaataatatcaattaaatactatagccaaaccctatttaaaggggattatccttattctttatcattgtcaaagatggattttctatttcccattctgtagctttgtccagagagtttaatgacttcacaatgatacaaaagccgatcaagtatagcagaggcaagcacttcatcatccagagtttttgcccattcagtcggagccttgtttgttgtgattatcaaggacgctttctcatggagagtgttgattaggttaaagaaacccgctgcatcttcttttttcacagggaacagcattatatcatcaatggcgacgaggtcagctttcaacaaacggttgtaggcagtcatggcagatggcatcagtgttttcattttaatggtgtttataacatcttccatcgtaaccatgtatgccttgtaaccttgcgataccgcttcatagacaagtcctgccgcaataaatgttttcccggtaccggatggtcccatgagtatcagattgtaattctgttcaagccatccgagatgccttaattcacgcagtcttggtgcggttatgccttgtgagtaattatggtcgaaaaggtctaggtcgtgtcttgacggcagagaagctgcttttagtcgccgttgtaagtctttgctatccctttccagaacttctctagcaagcaaatcatgtaaaaattcaacataggtcttgctctgttcccgtgcaatatgggcttcggattccaataacctcggaagggcatacaagcgtaaacgcgagcataaatttttaatctgttcgttcattatcatataaaaaaggtattgaatgttgatatgtctgttttatcgggcaccatggaagaggtatcggaggatgggaccggctctgtttctacaggaacttccacaagggcctctcctttgtggactctgatactttcggctactttcatcaggctacatccattaaagaccttcacttccaaacatcttgtaaaggcttctatcaacgtgggttctgtatagaagggatatcggagaagtataaactgcaggttgtctctatagttacgattcttatgaatgcgtagttcagataaataggtatcaatgaccgtatccccgggaagtcttttacggacagtagcctcgtaatcatccaaggcagcttcacggtctcgccgatgtgaggtattacttattaactgtcctttatctttgcagattttgtgtgctgctatatttttccctgtttcaaggctgtaaatatacagcatctcttccttttcttccagatatacctgtgttcggtgaccttggtaggtacctgtaggaacactgtaatagttccccttgtaggtaatcacgttatccttcctgacatgatggggtaaaagctttggggaagggattgtcggaattccccgataaggcatgagatggggtcttcccatctcgaactccactgatgggatacgacgtatgccatgatgctccataccgttagcagtacgttgcaaccatgcttgaacctcctcgttgagttgctctatggaggtaaattcacgtccccggagaaaattgtactttacgtacttcactacgttctctatctttcctttgctttcgggatctgatttacggcagaacaccggctcgaacccatgttcacgaaccaaggctcgaaagccgtgggtaagtatcaggtctcctaggttctccttgacaagaaaaaccttgtcctggtcataaactattttccgaggtactcccgagaaatattcaaaggcaagttcgtgggcataaactgcaagatcggtagtaaacggggtacggctgaaataaataaatttataacggctacggctaagactcattgcaaaaaaatatactttcaagggtatgccttgcgaagtcttcatccagcgttctccaaaatcgcattgggcatattgaccataaggtgtttccggttgcttctcataaggacggtaactcttttccaattctttgggcagattatgattcagacgtactcggttgacaaagttggataccgttttagctgtgacatggggaaggtctgtaaaatgttcccgtaaacggtcatggagttgcggagatgacaaaaatggccatttgcgtaactctccgataacataagcttcataatcatcaagtttatggctgtatcggcgctcgtaactttgactctgcttaaactcttcttctgtcatagacagatacttggacaccgtttgacggtgaagacctaatgatatgcctatttgactcttgtttaggccatttgaaaataattctttaactttgtaccacattagatacttctgtaatttggaagtctcactcatagcattgtgattagttgttgacaactctaatttacaatgctattttcttttattctattgtcgattttacttttccgatttttgacgatacaaaattaccgattaca
